(19) United States
(12) Patent Application Publication
(10) Pub. No.: US 2011/0010803 A1
(43) Pub. Date: Jan. 13, 2011

(54) Polypeptides, Such As Lipases, Capable Of Altering The Seed Storage Content In Transgenic Plants

(75) Inventors: Thorsten Zank, Mannheim (DE); Oliver Oswald, Lautertal (DE); Tom Wetjen, Mannheim (DE)

Correspondence Address: CONNOLLY BOVE LODGE & HUTZ, LLP, P O BOX 2207, WILMINGTON, DE, 19899, US

(73) Assignee: BASF Plant Science GmbH, Ludwigshafen (DE)

(21) Appl. No.: 12/675,313

(22) PCT Filed: Aug. 22, 2008
(86) PCT No.: PCT/EP08/61014

§ 371 Date: Feb. 25, 2010

(30) Foreign Application Priority Data
Aug. 28, 2007 (EP) 07115109.6

(51) Int. Cl. A01H 1/00; C07H 21/04; C07H 21/02; C12N 15/63; C12N 5/10; C12P 21/02; C12N 9/16; C07K 14/415; C07K 16/16; A01H 5/00; C12P 7/64

(52) U.S. Cl. 800/281; 536/23.2; 536/23.6; 435/320.1; 435/325; 435/69.1; 435/196; 530/370; 530/387.9; 800/295; 435/134; 536/24.5

(57) ABSTRACT

This invention relates generally to nucleic acid sequences encoding proteins that are related to the presence of seed storage compounds in plants. More specifically, the present invention relates to nucleic acid sequences encoding polypeptides being capable of altering the seed storage content and, in particular, oil, lipid and fatty acid metabolism regulator proteins and the use of these sequences in transgenic plants. In particular, the invention is directed to methods for manipulating seed storage compounds in plants and seeds. The invention further relates to methods of using these novel plant polypeptides to stimulate plant growth and/or to increase yield and/or composition of seed storage compounds.

[0001] Described herein are inventions in the field of genetic engineering of plants, including isolated nucleic acid molecules encoding polypeptides to improve agronomic, horticultural, and quality traits. This invention relates generally to nucleic acid sequences encoding proteins that are related to the presence of seed storage compounds in plants. More specifically, the present invention relates to nucleic acid sequences encoding polypeptides being capable of altering the seed storage content and, in particular, oil, lipid and fatty acid metabolism regulator proteins and the use of these sequences in transgenic plants. In particular, the invention is directed to methods for manipulating seed storage compounds in plants and seeds. The invention further relates to methods of using these novel plant polypeptides to stimulate plant growth and/or to increase yield and/or composition of seed storage compounds.

[0002] The study and genetic manipulation of plants has a long history that began even before the famed studies of Gregor Mendel. In perfecting this science, scientists have accomplished modification of particular traits in plants ranging from potato tubers having increased starch content to oilseed plants such as canola and sunflower having increased or altered fatty acid content. With the increased consumption and use of plant oils, the modification of seed oil content and seed oil levels has become increasingly widespread (e.g. Töpfer et al. 1995, Science 268:681-686). Manipulation of biosynthetic pathways in transgenic plants provides a number of opportunities for molecular biologists and plant biochemists to affect plant metabolism giving rise to the production of specific higher-value products. The seed oil production or composition has been altered in numerous traditional oilseed plants such as soybean (U.S. Pat. No. 5,955,650), canola (U.S. Pat. No. 5,955,650), sunflower (U.S. Pat. No. 6,084,164) and rapeseed (Töpfer et al. 1995, Science 268:681-686), and non-traditional oil seed plants such as tobacco (Cahoon et al. 1992, Proc. Natl. Acad. Sci. USA 89:11184-11188).

[0003] Plant seed oils comprise both neutral and polar lipids (see Table 1). The neutral lipids contain primarily triacylglycerol, which is the main storage lipid that accumulates in oil bodies in seeds. The polar lipids are mainly found in the various membranes of the seed cells, e.g. the endoplasmic reticulum, microsomal membranes, plastidial and mitochondrial membranes and the cell membrane. The neutral and polar lipids contain several common fatty acids (see Table 2) and a range of less common fatty acids. The fatty acid composition of membrane lipids is highly regulated and only a select number of fatty acids are found in membrane lipids. On the other hand, a large number of unusual fatty acids can be incorporated into the neutral storage lipids in seeds of many plant species (Van de Loo F. J. et al. 1993, Unusual Fatty Acids in Lipid Metabolism in Plants pp. 91-126, editor T S Moore Jr. CRC Press; Millar et al. 2000, Trends Plant Sci. 5:95-101).

[0004] Lipids are synthesized from fatty acids and their synthesis may be divided into two parts: the prokaryotic pathway and the eukaryotic pathway (Browse et al. 1986, Biochemical J. 235:25-31; Ohlrogge & Browse 1995, Plant Cell 7:957-970). The prokaryotic pathway is located in plastids that are also the primary site of fatty acid biosynthesis. Fatty acid synthesis begins with the conversion of acetyl-CoA to malonyl-CoA by acetyl-CoA carboxylase (ACCase). Malonyl-CoA is converted to malonyl-acyl carrier protein (ACP) by the malonyl-CoA:ACP transacylase. The enzyme beta-keto-acyl-ACP-synthase III (KAS III) catalyzes a condensation reaction, in which the acyl group from acetyl-CoA is transferred to malonyl-ACP to form 3-ketobutyryl-ACP. In a subsequent series of condensation, reduction and dehydration reactions the nascent fatty acid chain on the ACP cofactor is elongated by the step-by-step addition (condensation) of two carbon atoms donated by malonyl-ACP until a 16- or 18-carbon saturated fatty acid chain is formed. The plastidial delta-9 acyl-ACP desaturase introduces the first double bond into the fatty acid.

[0005] In the prokaryotic pathway the saturated and monounsaturated acyl-ACPs are direct substrates for the plastidial glycerol-3-phosphate acyltransferase and the lysophosphatidic acid acyltransferase, which catalyze the esterification of glycerol-3-phosphate at the sn-1 and sn-2 position. The resulting phosphatidic acid is the precursor for plastidial lipids in which further desaturation of the acyl-residues can occur.

[0006] In the eukaryotic lipid biosynthesis pathway thioesterases cleave the fatty acids from the ACP cofactor and free fatty acids are exported to the cytoplasm where they participate as fatty acyl-CoA esters in the eukaryotic pathway. In this pathway the fatty acids are esterified by glycerol-3-phosphate acyltransferase and lysophosphatidic acid acyl-transferase to the sn-1 and sn-2 positions of glycerol-3-phosphate, respectively, to yield phosphatidic acid (PA). The PA is the precursor for other polar and neutral lipids, the latter being formed in the Kennedy of other pathways (Voelker 1996, Genetic Engineering ed.:Setlow 18:111-113; Shanklin & Cahoon 1998, Annu. Rev. Plant Physiol. Plant Mol. Biol. 49:611-641; Frentzen 1998, Lipids 100:161-166; Millar et al. 2000, Trends Plant Sci. 5:95-101).

[0007] Storage lipids in seeds are synthesized from carbohydrate-derived precursors. Plants have a complete glycolytic pathway in the cytosol (Plaxton 1996, Annu. Rev. Plant Physiol. Plant Mol. Biol. 47:185-214) and it has been shown that a complete pathway also exists in the plastids of rapeseeds (Kang & Rawsthorne 1994, Plant J. 6:795-805). Sucrose is the primary source of carbon and energy, transported from the leaves into the developing seeds. During the storage phase of seeds, sucrose is converted in the cytosol to provide the metabolic precursors glucose-6-phosphate and pyruvate. These are transported into the plastids and converted into acetyl-CoA that serves as the primary precursor for the synthesis of fatty acids. Acetyl-CoA in the plastids is the central precursor for lipid biosynthesis. Acetyl-CoA can be formed in the plastids by different reactions and the exact contribution of each reaction is still being debated (Ohlrogge & Browse 1995, Plant Cell 7:957-970). It is however accepted that a large part of the acetyl-CoA is derived from glucose-6-phospate and pyruvate that are imported from the cytoplasm into the plastids. Sucrose is produced in the source organs (leaves, or anywhere where photosynthesis occurs) and is transported to the developing seeds that are also termed sink organs. In the developing seeds, sucrose is the precursor for all the storage compounds, i.e. starch, lipids, and partly the seed storage proteins.

[0008] Generally the breakdown of lipids is considered to be performed in plants in peroxisomes in the process know as beta-oxidation. This process involves the enzymatic reactions of acyl-CoA oxidase, ECHI, hydroxyacyl-CoA-dehydrogenase (both found as a multifunctional complex) and ketoacyl-CoA-thiolase, with catalase in a supporting role (Graham and Eastmond 2002). In addition to the breakdown of common fatty acids beta-oxidation also plays a role in the removal of unusual fatty acids and fatty acid oxidation products, the glyoxylate cycle and the metabolism of branched chain amino acids (Graham and Eastmond 2002).

[0009] Storage compounds such as triacylglycerols (seed oil) serve as carbon and energy reserves, which are used during germination and growth of the young seedling. Seed (vegetable) oil is also an essential component of the human diet and a valuable commodity providing feedstocks for the chemical industry. Although the lipid and fatty acid content and/or composition of seed oil can be modified by the traditional methods of plant breeding, the advent of recombinant DNA technology has allowed for easier manipulation of the seed oil content of a plant, and in some cases, has allowed for the alteration of seed oils in ways that could not be accomplished by breeding alone (see, e.g., Töpfer et al., 1995, Science 268:681-686). For example, introduction of a Δ¹²-hydroxylase nucleic acid sequence into transgenic tobacco resulted in the introduction of a novel fatty acid, ricinoleic acid, into the tobacco seed oil (Van de Loo et al. 1995, Proc. Natl. Acad. Sci USA 92:6743-6747). Tobacco plants have also been engineered to produce low levels of petroselinic acid by the introduction and expression of an acyl-ACP desaturase from coriander (Cahoon et al. 1992, Proc. Natl. Acad. Sci USA 89:11184-11188).

[0010] The modification of seed oil content in plants has significant medical, nutritional, and economic ramifications. With regard to the medical ramifications, the long chain fatty acids (C18 and longer) found in many seed oils have been linked to reductions in hypercholesterolemia and other clinical disorders related to coronary heart disease (Brenner 1976, Adv. Exp. Med. Biol. 83:85-101). Therefore, consumption of a plant having increased levels of these types of fatty acids may reduce the risk of heart disease. Enhanced levels of seed oil content also increase large-scale production of seed oils and thereby reduce the cost of these oils.

[0011] In order to increase or alter the levels of compounds such as seed oils in plants, nucleic acid sequences and proteins regulating lipid and fatty acid metabolism must be identified. As mentioned earlier, several desaturase nucleic acids such as the Δ⁶-desaturase nucleic acid, Δ¹²-desaturase nucleic acid and acyl-ACP desaturase nucleic acid have been cloned and demonstrated to encode enzymes required for fatty acid synthesis in various plant species. Oleosin nucleic acid sequences from such different species as canola, soybean, carrot, pine and Arabidopsis thaliana have also been cloned and determined to encode proteins associated with the phospholipid monolayer membrane of oil bodies in those plants.

[0012] It has also been determined that two phytohormones, gibberellic acid (GA) and absisic acid (ABA), are involved in overall regulatory processes in seed development (e.g. Ritchie & Gilroy, 1998, Plant Physiol. 116:765-776; Arenas-Huertero et al., 2000, Genes Dev. 14:2085-2096). Both the GA and ABA pathways are affected by okadaic acid, a protein phosphatase inhibitor (Kuo et al. 1996, Plant Cell. 8:259-269). The regulation of protein phosphorylation by kinases and phosphatases is accepted as a universal mechanism of cellular control (Cohen, 1992, Trends Biochem. Sci. 17:408-413). Likewise, the plant hormones ethylene (e.g. Zhou et al., 1998, Proc. Natl. Acad. Sci. USA 95:10294-10299; Beaudoin et al., 2000, Plant Cell 2000:1103-1115) and auxin (e.g. Colon-Carmona et al., 2000, Plant Physiol. 124:1728-1738) are involved in controlling plant development as well.

[0013] Some specific lipase polypeptides have been suggested to be suitable for increasing the oil content (see Eastmond 2006, Plant Cell 18: 665-675, Karim 2005, FEBS letters 579:6067-6073, Ling 2006, Russian Journal of Plant Physiology 53: 366-372, WO2006/131750, EP-1-637-606-A, WO2002/16655, WO2003/106670, US 2004 031072). However, not all of the reported lipases may affect the seed oil synthesis directly. Rather, some lipases may play a role in stress resistance and pathogen resistance and may thereby—via the overall well being—improve the capability of a plant for increasing seed oil contents (Naranjo 2006, Plant, Cell & Environment 29: 1890-1900; Oh 2005, Plant Cell 17: 2832-2847).

[0014] In addition to putative lipases, other polypeptides have been suggested to also be involved in the regulation of the lipid metabolism when overexpressed or down-regulated (by insertional disruption or antisense technology (e.g. RNAi)) in plants and plant seeds, among them homeodomain proteins, chlorophyllide A oxygenases, 14-3-3 proteins, ABC transporter proteins (see Zuo 2002, Plant Journal 30: 349-359; Ito 2004, Gene 331:9-15; Lu 1996, Plant Cell 8:2155-2168; Tanaka 2001, Plant Journal 26:365-373; Hirashima 2006, JBC 281: 15385-93; van Hemert 2001, Bioessays 23: 936-946; Yan 2004, Plant & Cell Physiology 45: 1007-1014; Baker 2006, Trends in Plant Science 11:124-132; Footitt 2006, Journal of Experimental Botany 57: 2805-2814; Footitt 2002, EMBO Journal 21:2912-2922; Hayashi 2002, Plant Cell Physiology 43: 1-11; Rottensteiner 2006, Biochimica et Biophysica Acta—Molecular Cell Research 1763:1527-1540; Theodoulou 2005, Plant Physiology 137:835-840; Zolman 2001, Plant Physiology 127:1266-1278).

[0015] Although several compounds are known that generally affect plant and seed development, there is a clear need to specifically identify factors that are more specific for the developmental regulation of seed storage compound accumulation and to identify genes that have the capacity to confer altered or increased seed storage compound production and, specifically, oil production to its host plant and to other plant species.

[0016] Thus, the technical problem underlying the present invention may be seen as the provision of means and methods for complying with the aforementioned needs. The technical problem is solved by the embodiments characterized in the claims and herein below.

[0017] In principle, this invention relates to nucleic acids (i.e. polynucleotides) from Brassica napus, Vernonia, Linum usitatissimum, Helianthus annuus, Zea mays, or Glycine max. These nucleic acids can be used to alter or increase the levels of seed storage compounds such as proteins, sugars, and oils in plants, including transgenic plants, such as canola, linseed, soybean, sunflower, maize, oat, rye, barley, wheat, rice, pepper, tagetes, cotton, oil palm, coconut palm, flax, castor, and peanut, which are oilseed plants containing high amounts of lipid compounds.

[0018] Specifically, the present invention relates to a polynucleotide comprising a nucleic acid sequence encoding a polypeptide comprising at least one of the amino acid sequence motifs shown in any one of SEQ ID NO: 93 to 154.

Seq ID 93 (rdm1 motif 1):
N-V-D-P-F-S-I-G-P-T-S-I-L-G-R-T-I-A-F-R-V-L-F-C-K-S-M-L-Q-L-R-R-D-L-F-R-F-L-L-H-W-
F-L-T-L-K-L-A-V-S-P-F-V-S-W-F-H-P-R-N-P-Q-G-I-L-A-V-V-T-I-I-A-F-V-L-K-R-Y-T-N-V-K-
A-K-A-E-M-A-Y-R-R-K-F-W-R-N-M-M-R-A-A-L-T-Y-E-E-W-A-H-A-A-K-M-L-D-K-E-T-P-K-
M-N-E-S-D-L-Y-D-E-E-L-V-K-N-K-L-M-E-L-R-H/P-R/G
Seq ID 94 (rdm1 motif 2):
P-E-L-H-K-G-R-L-Q-V-P-R/K-H/L-N/I-K-E-Y-I-D-E-V-S/T-T-Q-L-R-M-V-C-N/D-N/S-S/D-
E/S/X-E-D/E-L-S-L-D/E-E-K-L-S/A-F/D, where X is E-S-L
Seq ID 95 (rdm1 motif 3):
F/S-H-V-G-V-V-R/K-T-L-V-E-H-K-L-L/M-P-R-I-I-A-G-S-S-V-G-S-I-I/M-C-S/A-V-V-A-S/T-R-
S/T-W-P-E-L-Q-S-F-F-E-N/D-S-L/W-H-S-L-Q-F-F-D-Q-L/M-G-S/G-V/I-F-T/A-I/V-V-K-R-V-
M/T-T-Q/L-G-A-L/V-H-D/E-I-R-Q-L-Q-C/M-M-L-R-N/H-L-T-C/S-N-L-T-F-Q-E-A-Y-D-L/M
Seq ID 96 (rdm1 motif 4):
V/I-P-Y-H-P-P-F-N-L-E/G-P-E-E-G/X-K/S-S/A/T-S/P-T/A-R-R-W-R-D-G-S-L-E-V/I-D-L-P-
M-M-Q-L-K-E-L-F-N-V-N-H-F-I-V-S-Q-A-N-P-H-I-A-P-L-L-R-L-K-D/E-I/F-V-R-A/T-Y-G-G-
R/N, where X is G-G-D
Seq ID 97 (rdm1 motif 5):
A-N-C-G-I-E-L-A-L-D-E-C-V-A/V-I-L-N-H-M-R-R-L-K-R-S/I-A-E-R-A-S/A-T/S-A-S-S/H-G/X-
L-A/S-S-T-T/V-R-F-N/S-A-S-R/K-R-I-P/T-S-W-N-V/C-I, where X is S-H-H-G-
Seq ID 98 (rdm1 motif 6):
E/D-D-L-T/V-D/T-V/D-A/S-A/N-S/N-K/N-H/N-Q/L-G/H-I/A-S/G-R/X-D/N-G/L-S-D-S-D/E-
S/T-E-S/I-V-D/E-L/M-H/S-S-W-T-R-S/T, where X is S-S-C-G-T-N-G-K-T-W-K-T-Y-R-G-I-L
Seq ID 99 (rdm1 motif 7):
R/M-F-T/V-D-F-V/L-H/Q-G/N-L-D-V-D-I/T-T/A/D-L/Q-T/N-R/N-G/K-F/G-T/L-S/V-S-P/R-N/A-
S/N-P-A/N-V/D-P/F-G/Q-P/Y-V/R-S-P-S/R-F/L-S/A-P/T-R/L-S/D-R-S/N-L/S-A/D-A/S-Q/T-
S/E-E/S-S/E-E/P-S/R-D/E-K/I-R/G-E/N-S/X-S/F-N-S/V-S-S-I-T/L-V-S/T, where X is R-V
Seq ID 100 (rdm1 motif 8):
I/T-H/S-N-G-I/F-V-F/L-N-V-V-K/R-K/R-E-D/N-L-S/G-P/M-P/X-F/V-E/G-N-Y/Q-N/S-I/G-E-
V/L-A/P-E-C/S-V-Q-D/I-E/D-C/I-P-G/E-K/R-E-I/M-D-A/N-A/S-S-S/V-A/S-S/E-E/H-H/E-G/D-
D-D/N-E/D-E/D-S/D-T/D-V/D-A/E-R/E-S/E-L/X-T/E-E/H-T/K-Q/G-D/S-Y/V-N/P-S/V-M/K-D-
H/S-H/G-S/L-G/Q-M/D-D/S-Q/C-S-I/V-V/I-D-S/A, where X is L-S-G-S-S-H-D
Seq ID 101 (rdm1 like motif 1):
M-N-E-S-D-L-Y-D-E-E-L-V-K-N-K-L-M-E-L-R-H-R-R-H-E-G-S-L-R-D-I-I/M-F-C/F
Seq ID 102 (rdm1 like motif specific for B. napus):
V-R-N-F-R-V-D-D-F-E-D-T-R-D-N-G-L-L-T-D-E-A-L-A-A-S-V
Seq ID 103 (rdm1 like motif 2):
L/T-K-I-I-Q-V/N-D/P-D/S-F/Y-V/G-E-L
Seq ID 104 (rdm1 like motif 3):
S-A-I-K-A-N-C-G-I-E-L-A-L-D-E-C-V-T/V-N/I-L-N-H-M-R-R-L-N/K-R-S/I-A-E-R-A-A-A/S-A-
A/S-G/H-T/G-S/L-S-X-R-F-N/S-A-S-R/K, where X may be S-S-H-H-G-L-A-S-T-T or S-T-V
Seq ID 105 (rdm1 like motif 4):
V-D-I/T-A/D-L/Q-T/N-R/N-G/K-F/G-T/L-S/V-S-P/R-N/A-S/N-P-A/N-V/D-P/F-G/Q-P/Y-V/R-
S-P-S/R-F/L-S/A-P/T-R/L-S/D-R/X-S-L/D-A/S-A/T-Q/E-S-E-S/P-E/R-S/E-D/I-K/G-R/N-E/R-
S/V-S/F-N-S/V-S-S-I-S/L-A/V-T, where X is R-N
Seq ID 106 (rdm1 like motif 5):
P/L-V/S-X-E-L/V-P/A-E-S/C-V-Q-I/D-D/E-I/C-P-E/G-R/K-E-M/I-D-N/A-S/A-S-V/S-S/A-G/S-
H/E-E/H-D/G-D-N/D-D/E-D/E-N/S-D/T, where X may be E-N-Q-S-G or G-S-S-H-D-F-E-N-
Y-N-I
Seq ID 107 (TGL1 motif 1):
I-T-S-I-L-L-F-F-F-Y-T-I-I-V-A-S-S-E-P-S-C-R-P-Y-K
Seq ID 108 (TGL1 motif 2):
H-P-P-Q-A-A-F-L-P-Y-G-E-T-F-F-N-A-P-T-G-R-N-S-D-G
Seq ID 109 (TGL1 motif 3):
L-I-E-K-G-I-V-S-D-F-T-N-V-S-L-S-V-Q-L-N-T-F-K-Q-I-L-P-T-L-C-A-S-S-S-H-D-C-R-K-M-L-
E-D
Seq ID 110 (TGL1 motif 4):
T-A-K-E-K-E-Y-D-P-F-T-G-C-L-P-W-L-N-E-F-G-K-N-H-D-E
Seq ID 111 (TGL1 motif 5):
M-A-H-G-I-L-N-G-P-Y-A-T-P-A-F-N-W-S-C-L-D-A-A-S-V-D-N-E-S-S-F-G-S
Seq ID 112 (lysosomal lipase motif 1):
G-Y-S/T/P-C-T/S/G-E-H-T/L
Seq ID 113 (lysosomal lipase motif 2):
V/I-A/S/R-S/M-X-R/Y
whereas X may be either of the following polypeptide sequences:
P-A-Q-N-L-T-L-Q or
S-S-S-L-R-L-R-N-D-G-E or
G-E-S or
R-N-G-N-I-S-S-I or
Seq ID 114 (lysosomal lipase motif 3):
G/A-N-V/T-R-G-T-R/K/F-Y/F/W-S-Y/R/H-G/Q-H-V/T/I-T/S/-L/F-S/I/P/L-E/S-T/K/N/D-D/K/S-
K/S-E/D-F/Y-W-D/N-W-S-W-Q/A/D-D/E/G-L/I-A/V/G-M/A/N-Y/H/D-D-L/V-A/P-E/A-M/T-
I/V/F-Q/N/K-Y-M/I/V-Y/N/H-S/D-L/V-A/T-N/G-S/K-K-I/L-F/H-L/V/Y-V-G-H-S-Q-G-T-I/L-M/I-
S/A-F/L-A-A-L/F-T/S-Q-P/D-R/E/Q-V/I/L-A/V/L
Seq ID 115 (lysosomal lipase motif 4):
L/I-D/A-Q/E-M/S-V/I/L-V/L/Y-A/T/N-L/M-G-L/I-H/F-Q/E-I/L/F-N-F/M-R/K-S/G-E/G-T/W/S-
L/G/V-V/A/I-K/S-L/F-V/L-D/V/K-S/D-L-C-E/D/N-G/T/N-H/R/T
Seq ID 116 (Stratos lipase - soybean specific 5′ prefix):
M-A-S-K-P-K-S-N-G-N-S-K-C-N-K-G-F-A-D-S-Y-M-L-L-N-P-E-D-A-H-F-F-D-L-V-H-V-L-Y-
S-R-N-L-G-N-R-K-F-V-D-S-N-A-E-G-S-Y-E-G-S-F-R-Q-R-W-L-I-F-V-S-V-V-L-Q-K-L-L-L-L-
I-A-K-P-L-S-F-F-G-S-C-V-E-F-F-I-N-L-L-V-L-N-G-G-F-I-M-I-V-I-N-F-L-T-G-H-L-V-V-P-D-R-
N-A-P-N-Y-L-S-C-I-G-N-L-D-A-R-V-K-L-D-A-I-T-R-D-D-C-R-Y-Y-V
Seq ID 117 (Stratos lipase - oilseed rape specific 5′ prefix):
M-S-E-T-N-M-K-F-C-N-S-Y-F-L-V-D-P-T-K-A-S-L-L-D-L-L-L-L-L-F-F-P-N-L-T-N-K-R-F-I-D-
S-T-P-D-T-L-K-T-V-R-T-T-F-A-T-R-W-I-I-A-L-A-V-L-I-Q-K-I-L-I-L-V-R-K-P-M-A-S-I-G-R-L-
L-T-Y-W-P-N-L-L-T-E-N-G-G-F-F-K-L-I-L-H-L-V-T-G-K-L-V-K-P-E-E-S-S-T-T-Y-T-S-F-I-G-
C-T-D-R-R-V-E-L-D-K-K-I-N-V-A-T-I-E-Y-K-S
Seq ID 118 (Stratos lipase motif 1):
S/M-L-A/S-M/I-M-A-S-K-A/I-S/A-Y-E-N-A/K-A/S-Y/F-L/I-K/T-S/-L/V-I/V-K-N-H/T-W-K-M-
E/D-F-V-R/S-F/Y-F/Y-D-C/F-W/Y-N-D/A-F-Q-E/N/K-K/R-A/N-T/L-T-Q-V/A-L/F-I/V-V/F-L/K-
D/A-K/S-H/S/N-E/T-N-R/P-D/N-T/L-Y/I-V
Seq ID 119 (Stratos lipase motif 2):
G/E-I/L-P/K-G/N-I/V-G-K-M/V-H-G/A-G-F-M/S-K-A-L-G-L-Q-K-N/X₁-G-W-P-K-E-I/N-Q/I-
R/P/T-D/L-E/G/R-N/H-Q/X₂-L/Y, where X₁ is N-V and X₂ is L-P-P
Seq ID 120 (Stratos lipase motif 3):
T/V-I-R-Q/D-K/I-L-R-D/K-M/G-F/L-A/S-K/E-N-K/P-T/N-S/A/L
Seq ID 121 (Stratos lipase motif 4):
A/I-L-F/Y-P-A/T-V/I-L/M-A/F-I/L-H-G/D-E-D/K-E/L-L-L/I-D/E-K/R-L-E-G-V/I-Y-T-F-G-Q-P-R-
I/V-G-D-E-V/A-F/Y-G/A-E/Q-F/Y-M-K/R-E/Q-V/K-V/L-R-K/E-H/N-G/S-I-E/R-Y-E/C-R-F-V-
Y-N/C-N-D-I
Seq ID 122 (Stratos lipase motif 5):
I/L-P-F/Y-D-D-K-I/D-L-L/X-Y/F-K-H-Y/F-G-S/I-C-N/L-Y/F-F-N-S/R-L/R-Y-K/E-G/L-K/R-V/I-
K/L-E-D/E-A/E-P-N-E/K-N-Y-I/F, where X is F-S
Seq ID 123 (Stratos lipase motif 6):
S/N-P/L-W/L-C/C-V/L-I-P-K/M-M-F/L-N-A/G-V/A-L/W-E-L/F-I-R-S-F-T/I-I-A/Q-Y/F-K/W-
N/K-G-P/K-H/D-Y-R/K-E-G/N-W-F/M-L/M-F/R-S-F/I-R-L/I-V-G-L/I-L/I-I/L-P-G-L/T-P/S-A/N-
H-G/L-P-Q/Y-D-Y-I/V-N-S-T-L/R-L-G-S/G-I-E/S-K/R-H/S-F-K/T-A/T-D/X, where X is P-E-D-
K-L-S-L-I-A
Seq ID 124 (HDP - soybean specific 5′ prefix):
M-T-A-C-V-P-N-L-K-G-T-S-S-L-K-D-D-E-A-S-L-Q-R-E-L-R-N-A-E-C-M-A-S-L-A-S-S-G-G-
F-H-K-R-D-G-L-Y-N-P-Q-H-P-S-M
Seq ID 125 (HDP motif 1):
C/M-L/E-G/D-E/F-G/R-Q/V-S/R-H-G/E-S/F-Q/S-G/S-F/T-S/T-N/S-N/V-M/S-L-N/D-S-Q/R-Y-
L/V-K-A-A-Q/R-E/C-L-L-D/E-E-I/V-V/I-N/D-V/M-R/X₁-K/R-Q-T/V-S/D-L-E/C-K/N-Q/D-Q/V-
S/L-F/I-R/Q-D/Q-I/L-G/F-L/P-D/G-G/R-S/R-K/R-D/P-S/G-D/F-G-K/L-S-T/-S-S/E-Q/I-S/K-
V/S-Q/E-I/L-S/C-N/X₂, where X₁ is G-G and X₂ is S-G-P-N-G-S-S-A-A-N-S
Seq ID 126 (HDP motif 2):
N/E-L-L/Q/H-D/I/K-K/R-K/I-T-K-L-L/Y-S-M/L-L-D/Q/E-E/Q-V-D-K/E/R-R/K-Y//F-R/D-Q/I/H-
Y-C-H/N/E-Q-M/L-Q/E/K-I/Q/A-V-V/I
Seq ID 127 (HDP motif 3):
D/E-M/E/T/S-V/S-A/S-G/R/X-C/E/N/S-G/R-A/G-A/S/C-E/K/G-P/L/N/G-Y/I-T/H/L-A/G/S-
L/T/V-A/R/G-L/F/V-R/Q/T/K-T/A/D/G-I/M/N-S/T/V-R/K/E-H/Q/A-F/L/-R/G/Q-C/S/V-L/S-
H/Q/K/E-D/E/R-A/R-I/N-S/L/M/R-G/S-Q/A-I/N-Q/K/P-V/S/A/G-T/L/A/D-Q/R/S/E-R/E-
N/R/S/D-L/F/D-G/I-G/X; where X may be E-Q-E or E-E-D-S-L-T-G-G-G-K-P-D or I-S-Q-D-
F-V-P-K-I-V-T-S
Seq ID 128 (HDP motif 4):
D/E-Q/G/N/R-Q/N/S-L/T/S-R/X₁-Q/L/D-Q/E-K/R-A/G/L-L/G/N-Q/W/A-Q/V/E-L/Q/V-G/E-
V/P/M/G-M/Q/I/D-R-Q/H/I/P-A/M/D-W/L/D-R/K/X₂-P/A-Q/I/K/A-R/E/Q, where X₁ may be G-
S-G-D or P-S-S and X₂ is G-D
Seq ID 129 (HDP motif 5):
E/H/S-H/I-F-L/F-H/T-P/H-Y/I-P/Q-K/S/R-D/I-S/A/Q-E/T-K/N-I/L/A-M/C-L-A/Q-R/S/K-Q-T/A-
G-L-T/S-K/R-N/S-Q-V-A/S
Seq ID 130 (HDP motif 6):
V/I-E-E-M-Y-K/L-E-E-F/I-D/G/K-V/D/E-Q/S/H-A/S/E-S/D/Q-D/E/N-N/S/G-K/M-R/Q/D-
E/R/D-E/T-S/G/N-Q/N/T-D/S-N/D/K-L/S/N-I/N/D
Seq ID 131 (HDP - soybean specific 3′ suffix):
T-V-D-D-S-V-Q-H-H-G-L-K-L-D-H-A-D-R-G-I-Q-S-S-D-H-G-E-N-A-M-D-P-R-I-G-K-L-Q-G-
D-Q-R-F-N-M-N-N-N-N-S-P-Y-Y-G-D-G-C-I-M-A-S-T-P-A-T-Y-D-L-S-E-L-G-N-I-A-V-G-G-
H-V-S-L-A-L-E-L-R-N-C-E-S-E-G-F-G-V-S-N-D-D-M-H-K-R-R-K-K-T-L-A-S-S-P-E-A-D-L-
L-D-Y-H-F-T-D-T-G-K-Q-Q-N-K-F-G-N-P-H-L-L-H-E-F-V-V
Seq ID 132 (CAO motif 1):
M-N-A/X₁-I/V-A/F-T-A/S-A/S-L/A-L-S-L-P-F/I-S/F-F/L-R/X₂-S/A-S/G-K/Q-L-D/T-T/R-K-K/R-
G/D-L/V-K-G-R/E-F-R-V-F-A-V-Y/F-G-E-E/X₃-D/E, where X₁ is A-A and X₂ may be S-K or
C-K-T-R and X₃ may be E-I or D-S-G-L-V
Seq ID 133 (CAO motif 2):
N/S-T/Q/A-W-S/G-A/H-L-F-D-V-E-D-P-R-S-K-V/T/F-P-Q/P/X₁-Y/N-K/X₂-G-K-F/V-L/M-D-
V/I-Y/S/N-Q-A-L-E-V-A-R-Y/F/H/L-D-I-Q-Y-C/L-D-W-R-A-S/R-Q-D-L/V-L-T-I-M-L/H-L-H-
E/D-K-V-V-E/D-V-L-N-P-L-A-R-D/E-Y-K-S-I-G-T-M/V/L-K-K-E-L-A-E/G-L-Q-E/D-E-L-A-
Q/K, where X₁ is P-P-P and X₂ is K-G-K
Seq ID 134 (CAO motif 3):
S/T-S/T-A-L-D/E-K-L-A-Y/H-M-E-E-L-V-N-D-K/R-L-L-Q/P-E/D-R-S/V-T/A-T-E/D-V/S-
S/D/A-Q/R-P/X-S-P/Y-S-T-S-F/V/A-K/Q/N-P/D/S-V/L-D/V-I/R/T-E-K-R/T-R/N-S/I/Q-P/G-
R/G-K-S-L-D/N-I/V-S-G-P-V-Q-S/P-Y-H/S-T/P, where X is T-S-S
Seq ID 135 (CAO motif 4):
S/T-T/A/N-D-L-K-D/H-D-T-M-I/V-P-I-E/D-C-F-E/D-E/Q/D-P/F-W/V-V/E-I-F-R-G-K/E-D-G-
K/E-P-G-C-V-Q/R-N-T-C-A-H-R-A-C-P-L/I-H/D/E-L-G-S/T-V/K-N-E/K
Seq ID 136 (CAO motif 5):
T/S-T-D-G-K/N-C-E/T-K-M-P-S-T-R/K-L/Q-L-N/D-V-K-I/L-K-S-L/I-P-C-F/L-E-T/Q/K-E/D-G-
M-I-W-V/I-W-P-G-N/D-D/E-P-P-T/S/A-A/P-T/N-L/I-P-S-L/I-L/K-P-P-S/A/K-G-F-E/V/Q-V/I-H-
A-E-I/L-V-M-E/D-L-P-I/V
Seq ID 137 (CAO motif 6):
S/N-L/F-V-K/N-F-L-T-P-A/S-S-G-L-Q/E-G-Y-W-D-P-Y-P-I-D-M-E-F-R/K-P-P-C-M/I-V-L-S-
T-I-G-I-S-K-P-G/A-K-L-E-G-Q/K-S-T-S/K/E/R-Q/E-C-A/E/S
Seq ID 138 (CAO motif 7):
K/R-Q/N-K-T-R-L-L/I-Y/I-R/Q-M/N-S/V-L/P-D/G-F-A-P-V/I/L-L-K/Q-H/N/Y-I/L/V-P-F/L-M-
Q/E/H/K-H/I/Y-L-W-R-Y/H
Seq ID 139 (CAO motif 8):
Q/K-V-L-N-E-D-L-R-L-V-L/V-G-Q-Q-E/D-R-M-N/L/I-N-G-A/E-N-V/I-W-N-F/M-P-V-S/A-Y-D-
K-L-G-V-R-Y-R-L/M-W-R-N/D/T-A-L/V-E/D/R-Q/R/E-G-T/D/A/S-K/D-Q/K-P/L-P-F-S-K/G/X,
where X is P-Q-H-I-D
Seq ID 140 (14-3-3 motif 1):
E-R-Y-E/D-E-M-V-Q/H/N/E/D/K-F/A-M-E/Q/K-Q/K/S-L/V-V/A-T/S/V/M/A/K-G/S/L/A/T/G
Seq ID 141 (14-3-3 motif 2):
E-S/G-R-K/G-N-D/E-E/D/V/A-H/N-V/A-S/T/AK/M-L/R/T-V/I-K/R-D/G/H/E-Y-R-S/Q-K-V/I-E-
S/T/G/N-E-L-S/T-S/T/Q/N/K/D-V/I-C-S/E/A/K/D-G/S/D-I-L/M-K/N/A-L/V-L/I/M-D/E-S/E/T-
H/N/K-L-I/V/L-P/G-S/A-A/V/S/T-A/T/F/S-A/S/T-S/G
Seq ID 142 (14-3-3 motif 3):
H/Y-R-Y-M/L-A-E-F-K-S/AV/T-G-D/E/N/S/A-E/D/H-R/K-K-T/A/E-A-A-E/D-D/Q/N/S/A-T/S-
M/L-L/G/V/I/K/S/N-A/S-Y-K/Q-A/L/S-A-S/X-I/V/T-A-A/V/S/N/L-A/T/G/E/S-D/E-M/L-A/P/S-P-
T-H, where X is Q-D
Seq ID 143 (14-3-3 motif 4):
L/M-N-S/Q-S/P-D/E-K/R-A-C-N/D/S/A/H-M/L-A/R-K/N-Q/R
Seq ID 144 (cts motif 1):
H-S-L/K-M/Y-L-L-R/K-K-K-W-L-Y/F-G-I-L-D-D-F-V/I-T-K-Q-L
Seq ID 145 (cts motif 2):
G/S-V-N/S-S/A-E/I-N/P-R/P-T/V-S/R-R/D-L/V-D/H-S-Q/S-D-R/V-I-S-F-S
Seq ID 146 (cts motif 3):
T/S-S-V/I-F-R-V-L-R-D/G-I/L-W-P-T/I-V/A-C/S-G-R-L-S-K/R-P-S/X-L/V-D/V-I/D-K/E-E-L/D-
G-S-G-N/C-G-I-F-F/Y, where X is S-E
Seq ID 147 (cts motif 4):
E-E-A-E-K/V-R/K-A/V-A/L-K-L/M-Y-T/G-N/K-G/D-E-T/K-S/H-A-E/D-A/T-G/R-N-I/L-L-D-V/T-
H/R-L-K-T/A-I-L-E-N/S-V-R-L-V/N-Y-L-L-E-R-D/E-E/G-S-G/N-W-D-A
Seq ID 148 (cts motif 5):
R/H/K-P-K-F-G-I-L-D-E-C-T-N-A-T-S-V-D-V-E-E-Q/H-L-Y-R/G-V/L-A-K/T-D/S-M-G-V/I-T-
F/V-I/V-T
Seq ID 149 (human lipase like - soybean specific 5′ prefix):
M-F-I-Y-C-L-I-S-T-G-S-G-S-R
Seq ID 150 (human lipase like motif 1):
M-G/A-P/I-S-I/L-F/L-S/P-S/R-H/P-A/F-H/I-S-H/L-R-L/T-P/S-Y/K-A/S-A/F-N-L-N/S-P-N/R-
S/V-S/F-L/S-L-R-R/L-R/S-A/C-Q/S-F/S-I/S-S-F/N-A/G-S-A/X-G-G/N-F/Q-K/Q-D/V-E/S-E/S-
A/N-T/P-A/E, where X is N-S-S-P-P-Q-P-R-P-Q
Seq ID 151 (human lipase like motif 2):
V/A-A-T-G-E/D-L/M-F-L/I-G-L/V-A-T/S-R-L-I/L-K-S/K-R/S-N-K/Q-G/R-S/T-S/P-S/P-L/S-
A/D-E-G/X₁-E-R-I-G-A/T-V-V/I-E-D-E-I/V-D-P-D/E-V/M-V/I-W-E-Q-R-V-K-D-V-E-A-E-R/K-
E/X₂-R/S-R/K-L/V/A-V/I, where X₁ is D-S-G-S-V-G-M-F-E-N-N-S-E and X₂ may be N-R-Y
or T-I-S
Seq ID 152 (human lipase like motif 3):
F/L-L-I-Q/E-N/K-G-Y-I-K-E/D-T-T-P-L-A-G-S/A-S-A-G-A-I-V-C-A-V/T-I/V-A/T-S-G-A-S/T-M-
E/Q-E-A-L-N/Q/E-A/L-T-K-I/V/T-L-A-E/H/Q-D-C-R-N/R/L/S-R/N/K
Seq ID 153 (human lipase like motif 4):
D/E-I/S/V-L/M-D/E-K/Q-F/L-L-P-D-D-V/I/A-H-I-R-S-N-G-R-V-R-V-A-V/I-T-Q-L/V/I-L-W-R/K-
P-R-G-L-L-V-D-Q-F-D/N-S-K-E/S-D-L-I-N-A-V-F/N/I-T-S-S/A
Seq ID 154 (human lipase like motif 5):
S/A-A-A/D-Q/K-T-V/I-R/Q-V-C-A-F-P/S-A-S-R/N-L/F-G/K-L-Q/K-G-I-G-I-S-P-D-C-N-P-E/L-
N-V/K-C/A-S/T-P/A-R-Q-L-F/L-N/K-W-A-L-E-P-A-E-D-A/E-I/V-L-D/E-R/K-F/L-F-E-L-G-Y-
L/A-D-A-S/A-V/T-W-A/S-K/E-E/M-N-P-V-E/D-V/E-I/L-V-Q/Y-D-D-S/T-P-A-F/A-G/Q-S/A-S/I-
S/Q-A-T/S

[0019] Amino acids which may be alternatively present at a certain position in the above shown SEQ ID Nos are separated by “/”.

[0020] It has been found in accordance with the present invention that polypeptides having a biological activity which if present in plant seeds results in a significant increase of seed storage compounds are characterized by at least one of the aforementioned amino acid sequence motifs.

[0021] More specifically, the present invention contemplates a polynucleotide encoding a polypeptide comprising:
[0022] a) at least one rdm1/spd1 amino acid sequence motif as shown in any one of SEQ ID NOs: 93 to 100, wherein the polypeptide has lipase activity;
[0023] b) at least one rdm1-like amino acid sequence motif as shown in any one of SEQ ID NOs: 101 to 106, wherein the polypeptide has lipase activity;
[0024] c) at least one Lipase TGL1 amino acid sequence motif as shown in any one of SEQ ID NOs: 107 to 111, wherein the polypeptide has lipase activity;
[0025] d) at least one lysosomal Lipase amino acid sequence motif as shown in any one of SEQ ID NOs: 112 to 115, wherein the polypeptide has lipase activity;
[0026] e) at least one Stratos lipase amino acid sequence motif as shown in any one of SEQ ID NOs: 116 to 123, wherein the polypeptide has lipase activity;
[0027] f) at least one homeodomain protein amino acid sequence motif as shown in any one of SEQ ID NOs: 124 to 131, wherein the polypeptide has transcriptional regulatory activity;
[0028] g) at least one Chlorophyllide A Oxidase (CAO) amino acid sequence motif as shown in any one of SEQ ID NOs: 132 to 139, wherein the polypeptide has CAO activity;
[0029] h) at least one 14-3-3-stay green protein amino acid sequence motif as shown in any one of SEQ ID NOs: 140 to 143, wherein the polypeptide has signal transduction activity;
[0030] i) at least one CTS amino acid sequence motif as shown in any one of SEQ ID NOs: 144 to 148, wherein the polypeptide is a fatty acid transporter; or
[0031] j) at least one human lipase like protein amino acid sequence motif as shown in any one of SEQ ID NOs: 149 to 154, wherein the polypeptide has lipase activity.

[0032] More preferably, the polypeptide shall comprise at least two different, at least three or all of the amino acid sequence motifs recited in any one of a) to j), respectively. Advantageously, polynucleotides encoding such polypeptides can be used for generating transgenic organisms, preferably, transgenic plants, to be used for the production of the aforementioned lipid compounds, e.g., the storage compounds referred to before.

[0033] Preferably, the said polynucleotide comprises a nucleic acid sequence selected from the group consisting of:
[0034] (a) a nucleic acid sequence as shown in any one of SEQ ID NOs: 1, 2, 4, 6, 7, 9 to 11, 13, 14, 16, 17, 19, 20, 22, 24, 25, 27, 28, 30, 32, 33, 35, 37 to 40, 42, 44, 46, 48, 50, 51, 53, 55, 57, 59, 61, 63, 65, 67, 69 to 85, 87, 89, or 91;
[0035] (b) a nucleic acid sequence encoding a polypeptide having an amino acid sequence as shown in any one of SEQ ID NOs: 3, 5, 8, 12, 15, 18, 21, 23, 26, 29, 31, 34, 36, 41, 43, 45, 47, 49, 52, 54, 56, 58, 60, 62, 64, 66, 68, 86, 88, 90, or 92;
[0036] (c) a nucleic acid sequence which is at least 70% identical to the nucleic acid sequence of (a) or (b), wherein said nucleic acid sequence encodes a polypeptide being capable of altering the seed storage content and wherein said polypeptide comprises at least one of the amino acid sequences shown in any one of SEQ ID NOs: 93 to 154; and
[0037] (d) a nucleic acid sequence being a fragment of any one of (a) to (c), wherein said fragment encodes a polypeptide or biologically active portion thereof being capable of altering the seed storage content and wherein said polypeptide or biologically active portion comprises at least one of the amino acid sequences shown in any one of SEQ ID NOs: 93 to 154.

[0038] More preferably, the said polynucleotide comprises a nucleic acid sequence selected from the group consisting of:
[0039] (a) a nucleic acid sequence as shown in SEQ ID NO: 1, 2, 4, 6, or 7;
[0040] (b) a nucleic acid sequence encoding a polypeptide having an amino acid sequence as shown in SEQ ID NO: 3, 5, or 8;
[0041] (c) a nucleic acid sequence which is at least 70% identical to the nucleic acid sequence of (a) or (b), wherein said nucleic acid sequence encodes a lipase polypeptide being capable of altering the seed storage content and wherein said polypeptide comprises at least one of the amino acid sequences shown in any one of SEQ ID NOs: 93 to 100; and
[0042] (d) a nucleic acid sequence being a fragment of any one of (a) to (c), wherein said fragment encodes a lipase polypeptide or biologically active portion thereof being capable of altering the seed storage content and wherein said polypeptide or biologically active portion comprises at least one of the amino acid sequences shown in any one of SEQ ID NOs: 93 to 100.

[0043] More preferably, the said polynucleotide comprises a nucleic acid sequence selected from the group consisting of:
[0044] (a) a nucleic acid sequence as shown in any one of SEQ ID NOs: 9 to 11, or 13;
[0045] (b) a nucleic acid sequence encoding a polypeptide having an amino acid sequence as shown in SEQ ID NO: 12;
[0046] (c) a nucleic acid sequence which is at least 70% identical to the nucleic acid sequence of (a) or (b), wherein said nucleic acid sequence encodes a lipase polypeptide being capable of altering the seed storage content and wherein said polypeptide comprises at least one of the amino acid sequences shown in any one of SEQ ID NOs: 101 to 106; and
[0047] (d) a nucleic acid sequence being a fragment of any one of (a) to (c), wherein said fragment encodes a lipase polypeptide or biologically active portion thereof being capable of altering the seed storage content and wherein said polypeptide or biologically active portion comprises at least one of the amino acid sequences shown in any one of SEQ ID NOs: 101 to 106.

[0048] More preferably, the said polynucleotide comprises a nucleic acid sequence selected from the group consisting of:
[0049] (a) a nucleic acid sequence as shown in SEQ ID NO: 14 or 16;
[0050] (b) a nucleic acid sequence encoding a polypeptide having an amino acid sequence as shown in SEQ ID NO: 15;
[0051] (c) a nucleic acid sequence which is at least 70% identical to the nucleic acid sequence of (a) or (b), wherein said nucleic acid sequence encodes a lipase polypeptide being capable of altering the seed storage content and wherein said polypeptide comprises at least one of the amino acid sequences shown in any one of SEQ ID NOs: 107 to 111; and
[0052] (d) a nucleic acid sequence being a fragment of any one of (a) to (c), wherein said fragment encodes a lipase polypeptide or biologically active portion thereof being capable of altering the seed storage content and wherein said polypeptide or biologically active portion comprises at least one of the amino acid sequences shown in any one of SEQ ID NOs: 107 to 111.

[0053] Also more preferably, the said polynucleotide comprises a nucleic acid sequence selected from the group consisting of:
[0054] (a) a nucleic acid sequence as shown in any one of SEQ ID NOs: 17, 19, 20, 22, 24 or 25;
[0055] (b) a nucleic acid sequence encoding a polypeptide having an amino acid sequence as shown in any one of SEQ ID NOs: 18, 21, 23 or 26;
[0056] (c) a nucleic acid sequence which is at least 70% identical to the nucleic acid sequence of (a) or (b), wherein said nucleic acid sequence encodes a lipase polypeptide being capable of altering the seed storage content and wherein said polypeptide comprises at least one of the amino acid sequences shown in any one of SEQ ID NOs: 112 to 115; and
[0057] (d) a nucleic acid sequence being a fragment of any one of (a) to (c), wherein said fragment encodes a lipase polypeptide or biologically active portion thereof being capable of altering the seed storage content and wherein said polypeptide or biologically active portion comprises at least one of the amino acid sequences shown in any one of SEQ ID NOs: 112 to 115.

[0058] More preferably, the said polynucleotide comprises a nucleic acid sequence selected from the group consisting of:
[0059] (a) a nucleic acid sequence as shown in any one of SEQ ID NOs: 27, 28, 30 or 32;
[0060] (b) a nucleic acid sequence encoding a polypeptide having an amino acid sequence as shown in SEQ ID NO: 29 or 31;
[0061] (c) a nucleic acid sequence which is at least 70% identical to the nucleic acid sequence of (a) or (b), wherein said nucleic acid sequence encodes a lipase polypeptide being capable of altering the seed storage content and wherein said polypeptide comprises at least one of the amino acid sequences shown in any one of SEQ ID NOs: 116 to 123; and
[0062] (d) a nucleic acid sequence being a fragment of any one of (a) to (c), wherein said fragment encodes a lipase polypeptide or biologically active portion thereof being capable of altering the seed storage content and wherein said polypeptide or biologically active portion comprises at least one of the amino acid sequences shown in any one of SEQ ID NOs: 116 to 123.

[0063] More preferably, the said polynucleotide comprises a nucleic acid sequence selected from the group consisting of:
[0064] (a) a nucleic acid sequence as shown in SEQ ID NO: 33, 35, 37 or 38;
[0065] (b) a nucleic acid sequence encoding a polypeptide having an amino acid sequence as shown in SEQ ID NO: 34 or 36;
[0066] (c) a nucleic acid sequence which is at least 70% identical to the nucleic acid sequence of (a) or (b), wherein said nucleic acid sequence encodes a transcriptional regulatory polypeptide being capable of altering the seed storage content and wherein said polypeptide comprises at least one of the amino acid sequences shown in any one of SEQ ID NOs: 124 to 131; and
[0067] (d) a nucleic acid sequence being a fragment of any one of (a) to (c), wherein said fragment encodes a transcriptional regulatory polypeptide or biologically active portion thereof being capable of altering the seed storage content and wherein said polypeptide or biologically active portion comprises at least one of the amino acid sequences shown in any one of SEQ ID NOs: 124 to 131.

[0068] More preferably, the said polynucleotide comprises a nucleic acid sequence selected from the group consisting of:
[0069] (a) a nucleic acid sequence as shown in any one of SEQ ID NOs: 39, 40, 42, 44, 46, 48, 50 or 51;
[0070] (b) a nucleic acid sequence encoding a polypeptide having an amino acid sequence as shown in any one of SEQ ID NOs: 41, 43, 45, 47 or 49;
[0071] (c) a nucleic acid sequence which is at least 70% identical to the nucleic acid sequence of (a) or (b), wherein said nucleic acid sequence encodes a CAO polypeptide being capable of altering the seed storage content and wherein said polypeptide comprises at least one of the amino acid sequences shown in any one of SEQ ID NOs: 132 to 139; and
[0072] (d) a nucleic acid sequence being a fragment of any one of (a) to (c), wherein said fragment encodes a CAO polypeptide or biologically active portion thereof being capable of altering the seed storage content and wherein said polypeptide or biologically active portion comprises at least one of the amino acid sequences shown in any one of SEQ ID NOs: 132 to 139.

[0073] More preferably, the said polynucleotide comprises a nucleic acid sequence selected from the group consisting of:
[0074] (a) a nucleic acid sequence as shown in any one of SEQ ID NOs: 53, 55, 57, 59, 61, 63, 65 or 67;
[0075] (b) a nucleic acid sequence encoding a polypeptide having an amino acid sequence as shown in any one of SEQ ID NOs: 52, 54, 56, 58, 60, 62, 64 or 66;
[0076] (c) a nucleic acid sequence which is at least 70% identical to the nucleic acid sequence of (a) or (b), wherein said nucleic acid sequence encodes a signal transduction (14-3-3) polypeptide being capable of altering the seed storage content and wherein said polypeptide comprises at least one of the amino acid sequences shown in any one of SEQ ID NOs: 140 to 143; and
[0077] (d) a nucleic acid sequence being a fragment of any one of (a) to (c), wherein said fragment encodes a signal transduction (14-3-3) polypeptide or biologically active portion thereof being capable of altering the seed storage content and wherein said polypeptide or biologically active portion comprises at least one of the amino acid sequences shown in any one of SEQ ID NOs: 140 to 143.

[0078] More preferably, the said polynucleotide comprises a nucleic acid sequence selected from the group consisting of:
[0079] (a) a nucleic acid sequence as shown in any one of SEQ ID NOs: 69 to 84;
[0080] (b) a nucleic acid sequence encoding a polypeptide having an amino acid sequence as shown in SEQ ID NO: 68;
[0081] (c) a nucleic acid sequence which is at least 70% identical to the nucleic acid sequence of (a) or (b), wherein said nucleic acid sequence encodes a fatty acid transporter polypeptide being capable of altering the seed storage content and wherein said polypeptide comprises at least one of the amino acid sequences shown in any one of SEQ ID NOs: 144 to 148; and
[0082] (d) a nucleic acid sequence being a fragment of any one of (a) to (c), wherein said fragment encodes a fatty acid transporter polypeptide or biologically active portion thereof being capable of altering the seed storage content and wherein said polypeptide or biologically active portion comprises at least one of the amino acid sequences shown in any one of SEQ ID NOs: 144 to 148.

[0083] More preferably also, the said polynucleotide comprises a nucleic acid sequence selected from the group consisting of:
[0084] (a) a nucleic acid sequence as shown in any one of SEQ ID NOs: 85, 87, 89 or 91;
[0085] (b) a nucleic acid sequence encoding a polypeptide having an amino acid sequence as shown in any one of SEQ ID NOs: 86, 88, 90 or 92;
[0086] (c) a nucleic acid sequence which is at least 70% identical to the nucleic acid sequence of (a) or (b), wherein said nucleic acid sequence encodes a lipase polypeptide being capable of altering the seed storage content and wherein said polypeptide comprises at least one of the amino acid sequences shown in any one of SEQ ID NOs: 149 to 154; and
[0087] (d) a nucleic acid sequence being a fragment of any one of (a) to (c), wherein said fragment encodes a lipase polypeptide or biologically active portion thereof being capable of altering the seed storage content and wherein said polypeptide or biologically active portion comprises at least one of the amino acid sequences shown in any one of SEQ ID NOs: 149 to 154.

[0088] Also encompassed by this invention is a polynucleotide which comprises a nucleic acid sequence selected from the group consisting of:
[0089] (a) a nucleic acid sequence as shown in any one of SEQ ID NOs: 159, 161, 163, 165, 167, 169, or 171;
[0090] (b) a nucleic acid sequence encoding a polypeptide having an amino acid sequence as shown in any one of SEQ ID NOs: 160, 162, 164, 166, 168, 170, or 172;
[0091] (c) a nucleic acid sequence which is at least 70% identical to the nucleic acid sequence of (a) or (b), wherein said nucleic acid sequence encodes a polypeptide being capable of altering the seed storage content and, preferably, has rdm1 or rdm1-like lipase activity; and
[0092] (d) a nucleic acid sequence being a fragment of any one of (a) to (c), wherein said fragment encodes a polypeptide or biologically active portion thereof being capable of altering the seed storage content and, preferably, has rdm1 or rdm1-like lipase activity.

[0093] More preferably, the polypeptides as shown in SEQ ID NO: 160, 162, 164, 166, or 168 have rdm1 lipase activity while the polypeptides shown in SEQ ID NO: 170 or 172 have rdm1 like lipase activity.

[0094] The term “polynucleotide” as used in accordance with the present invention relates to a polynucleotide comprising a nucleic acid sequence which encodes a polypeptide having a biologically activity as specified above. More preferably, the polypeptide encoded by the polynucleotide of the present invention shall be capable of increasing the amount of seed storage compounds, preferably, fatty acids, oil or lipids, when present in plant seeds. The polypeptides encoded by the polynucleotide of the present invention are also referred to as lipid metabolism proteins (LMP) herein below. Suitable assays for measuring the activities mentioned before are described in the accompanying Examples. Preferably, the polynucleotide of the present invention upon expression in a plant seed shall be capable of significantly increasing the total content of a seed storage compound, preferably a fatty acid, an oil or a lipid. How to determine whether an increase is significant is described elsewhere in this specification. Further details are to e found in the accompanying Examples, below.

[0095] Preferably, the polynucleotide of the present invention upon expression in the seed of a transgenic plant is capable of significantly increasing the amount by weight of at least one seed storage compound. More preferably, such an increase as referred to in accordance with the present invention is an increase of the amount by weight of at least 1, 2.5, 5, 7.5, 10, 12.5, 15, 17.5, 20, 22.5 or 25% as compared to a control. Whether an increase is significant can be determined by statistical tests well known in the art including, e.g., Student's t-test. The percent increase rates of a seed storage compound are, preferably, determined compared to an empty vector control. An empty vector control is a transgenic plant, which has been transformed with the same vector or construct as a transgenic plant according to the present invention except for such a vector or construct is lacking the polynucleotide of the present invention. Alternatively, an untreated plant (i.e. a plant which has not been genetically manipulated) may be used as a control.

[0096] A polynucleotide encoding a polypeptide having a biological activity as specified above has been obtained in accordance with the present invention from Brassica napus, Vernonia, Linum usitatissimum, Helianthus annuus, Zea mays, or Glycine max. The corresponding polynucleotides, preferably, comprises the nucleic acid sequence shown in SEQ ID NO: 1, 2, 4, 6, 7, 9 to 11, 13, 14, 16, 17, 19, 20, 22, 24, 25, 27, 28, 30, 32, 33, 35, 37 to 40, 42, 44, 46, 48, 50, 51, 53, 55, 57, 59, 61, 63, 65, 67, 69 to 85, 87, 89, 91, 159, 161, 163, 165, 167, 169, or 171 encoding, inter alia, a polypeptide having the amino acid sequence of SEQ ID NO: 3, 5, 8, 12, 15, 18, 21, 23, 26, 29, 31, 34, 36, 41, 43, 45, 47, 49, 52, 54, 56, 58, 60, 62, 64, 66, 68, 86, 88, 90, 92, 160, 162, 164, 166, 168, 170, or 172. It is to be understood that a polypeptide having an amino acid sequence as recited above may be also encoded due to the degenerated genetic code by other polynucleotides as well.

[0097] Moreover, the term “polynucleotide” as used in accordance with the present invention further encompasses variants of the aforementioned specific polynucleotides. Said variants may represent orthologs, paralogs or other homologs of the polynucleotide of the present invention. The polynucleotide variants, preferably, also comprise a nucleic acid sequence characterized in that the sequence can be derived from the aforementioned specific nucleic acid sequences shown in SEQ ID NO: 1, 2, 4, 6, 7, 9 to 11, 13, 14, 16, 17, 19, 20, 22, 24, 25, 27, 28, 30, 32, 33, 35, 37 to 40, 42, 44, 46, 48, 50, 51, 53, 55, 57, 59, 61, 63, 65, 67, 69 to 85, 87, 89, 91, 159, 161, 163, 165, 167, 169, or 171 by at least one nucleotide substitution, addition and/or deletion whereby the variant nucleic acid sequence shall still encode a polypeptide having a biological activity as specified above. Variants also encompass polynucleotides comprising a nucleic acid sequence which is capable of hybridizing to the aforementioned specific nucleic acid sequences, preferably, under stringent hybridization conditions. These stringent conditions are known to the skilled worker and can be found in Current Protocols in Molecular Biology, John Wiley & Sons, N.Y. (1989), 6.3.1-6.3.6. A preferred example for stringent hybridization conditions are hybridization conditions in 6× sodium chloride/sodium citrate (=SSC) at approximately 45° C., followed by one or more wash steps in 0.2×SSC, 0.1% SDS at 50 to 65° C. The skilled worker knows that these hybridization conditions differ depending on the type of nucleic acid and, for example when organic solvents are present, with regard to the temperature and concentration of the buffer. For example, under “standard hybridization conditions” the temperature differs depending on the type of nucleic acid between 42° C. and 58° C. in aqueous buffer with a concentration of 0.1 to 5×SSC (pH 7.2). If organic solvent is present in the abovementioned buffer, for example 50% formamide, the temperature under standard conditions is approximately 42° C. The hybridization conditions for DNA:DNA hybrids are, preferably, 0.1×SSC and 20° C. to 45° C., preferably between 30° C. and 45° C. The hybridization conditions for DNA:RNA hybrids are, preferably, 0.1×SSC and 30° C. to 55° C., preferably between 45° C. and 55° C. The abovementioned hybridization temperatures are determined for example for a nucleic acid with approximately 100 by (=base pairs) in length and a G+C content of 50% in the absence of formamide. The skilled worker knows how to determine the hybridization conditions required by referring to textbooks such as the textbook mentioned above, or the following textbooks: Sambrook et al., “Molecular Cloning”, Cold Spring Harbor Laboratory, 1989; Hames and Higgins (Ed.) 1985, “Nucleic Acids Hybridization: A Practical Approach”, IRL Press at Oxford University Press, Oxford; Brown (Ed.) 1991, “Essential Molecular Biology: A Practical Approach”, IRL Press at Oxford University Press, Oxford. Alternatively, polynucleotide variants are obtainable by PCR-based techniques such as mixed oligonucleotide primer-based amplification of DNA, i.e. using degenerated primers against conserved domains of the polypeptides of the present invention. Conserved domains of the polypeptide of the present invention may be identified by a sequence comparison of the nucleic acid sequences of the polynucleotides or the amino acid sequences of the polypeptides of the present invention. Oligonucleotides suitable as PCR primers as well as suitable PCR conditions are described in the accompanying Examples. As a template, DNA or cDNA from bacteria, fungi, plants or animals may be used. Further, variants include polynucleotides comprising nucleic acid sequences which are at least 70%, at least 75%, at least 80%, at least 85%, at least 90%, at least 95%, at least 98% or at least 99% identical to the nucleic acid sequences shown in SEQ ID NO: 1, 2, 4, 6, 7, 9 to 11, 13, 14, 16, 17, 19, 20, 22, 24, 25, 27, 28, 30, 32, 33, 35, 37 to 40, 42, 44, 46, 48, 50, 51, 53, 55, 57, 59, 61, 63, 65, 67, 69 to 85, 87, 89, 91, 159, 161, 163, 165, 167, 169, or 171 retaining a biological activity as specified above. More preferably, said variant polynucleotides encode a polypeptide comprising at an amino acid sequence motif as specified for above. Moreover, also encompassed are polynucleotides which comprise nucleic acid sequences encoding amino acid sequences which are at least 70%, at least 75%, at least 80%, at least 85%, at least 90%, at least 95%, at least 98% or at least 99% identical to the amino acid sequences shown in SEQ ID NO: 3, 5, 8, 12, 15, 18, 21, 23, 26, 29, 31, 34, 36, 41, 43, 45, 47, 49, 52, 54, 56, 58, 60, 62, 64, 66, 68, 86, 88, 90, 92, 160, 162, 164, 166, 168, 170, or 172 wherein the polypeptide comprising the amino acid sequence retains a biological activity as specified above. More preferably, said variant polypeptide comprises an amino acid sequence motif as specified for above. The percent identity values are, preferably, calculated over the entire amino acid or nucleic acid sequence region. A series of programs based on a variety of algorithms is available to the skilled worker for comparing different sequences. In this context, the algorithms of Needleman and Wunsch or Smith and Waterman give particularly reliable results. To carry out the sequence alignments, the program PileUp (J. Mol. Evolution., 25, 351-360, 1987, Higgins et al., CABIOS, 5 1989: 151-153) or the programs Gap and BestFit (Needleman and Wunsch (J. Mol. Biol. 48; 443-453 (1970)) and Smith and Waterman (Adv. Appl. Math. 2; 482-489 (1981))), which are part of the GCG software packet [Genetics Computer Group, 575 Science Drive, Madison, Wis., USA 53711 (1991)], are to be used. The sequence identity values recited above in percent (%) are to be determined, preferably, using the program GAP over the entire sequence region with the following settings: Gap Weight: 50, Length Weight: 3, Average Match: 10.000 and Average Mismatch: 0.000, which, unless otherwise specified, shall always be used as standard settings for sequence alignments. For the purposes of the invention, the percent sequence identity between two nucleic acid or polypeptide sequences can be also determined using the Vector NTI 7.0 (PC) software package (InforMax, 7600 Wisconsin Ave., Bethesda, Md. 20814). A gap-opening penalty of 15 and a gap extension penalty of 6.66 are used for determining the percent identity of two nucleic acids. A gap-opening penalty of 10 and a gap extension penalty of 0.1 are used for determining the percent identity of two polypeptides. All other parameters are set at the default settings. For purposes of a multiple alignment (Clustal W algorithm), the gap-opening penalty is 10, and the gap extension penalty is 0.05 with blosum62 matrix. It is to be understood that for the purposes of determining sequence identity when comparing a DNA sequence to an RNA sequence, a thymidine nucleotide sequence is equivalent to a uracil nucleotide.

[0098] A polynucleotide comprising a fragment of any of the aforementioned nucleic acid sequences is also encompassed as a polynucleotide of the present invention. The fragment shall encode a polypeptide which still has a biological activity as specified above. Accordingly, the polypeptide may comprise or consist of the domains of the polypeptide of the present invention conferring the said biological activity. A fragment as meant herein, preferably, comprises at least 20, at least 50, at least 100, at least 250 or at least 500 consecutive nucleotides of any one of the aforementioned nucleic acid sequences or encodes an amino acid sequence comprising at least 20, at least 30, at least 50, at least 80, at least 100 or at least 150 consecutive amino acids of any one of the aforementioned amino acid sequences.

[0099] The variant polynucleotides or fragments referred to above, preferably, encode polypeptides retaining at least 10%, at least 20%, at least 30%, at least 40%, at least 50%, at least 60%, at least 70%, at least 80% or at least 90% of the biological activity exhibited by the polypeptide shown in SEQ ID NO: 3, 5, 8, 12, 15, 18, 21, 23, 26, 29, 31, 34, 36, 41, 43, 45, 47, 49, 52, 54, 56, 58, 60, 62, 64, 66, 68, 86, 88, 90, 92, 160, 162, 164, 166, 168, 170, or 172. The activity may be tested as described in the accompanying Examples.

[0100] The polynucleotides of the present invention either essentially consist of the aforementioned nucleic acid sequences or comprise the aforementioned nucleic acid sequences. Thus, they may contain further nucleic acid sequences as well. Preferably, the polynucleotide of the present invention may comprise in addition to an open reading frame further untranslated sequence at the 3′ and at the 5′ terminus of the coding gene region: at least 500, preferably 200, more preferably 100 nucleotides of the sequence upstream of the 5′ terminus of the coding region and at least 100, preferably 50, more preferably 20 nucleotides of the sequence downstream of the 3′ terminus of the coding gene region. Furthermore, the polynucleotides of the present invention may encode fusion proteins wherein one partner of the fusion protein is a polypeptide being encoded by a nucleic acid sequence recited above. Such fusion proteins may comprise as additional part other enzymes of the fatty acid or lipid biosynthesis pathways, polypeptides for monitoring expression (e.g., green, yellow, blue or red fluorescent proteins, alkaline phosphatase and the like) or so called “tags” which may serve as a detectable marker or as an auxiliary measure for purification purposes. Tags for the different purposes are well known in the art and comprise FLAG-tags, 6-histidine-tags, MYC-tags and the like.

[0101] Variant polynucleotides as referred to in accordance with the present invention may be obtained by various natural as well as artificial sources. For example, polynucleotides may be obtained by in vitro and in vivo mutagenesis approaches using the above mentioned mentioned specific polynucleotides as a basis. Moreover, polynucleotids being homologs or orthologs may be obtained from various animal, plant, bacteria or fungus species. Paralogs may be identified from Brassica napus, Vernonia, Linum usitatissimum, Helianthus annuus, Zea mays, or Glycine max, respectively.

[0102] The polynucleotide of the present invention shall be provided, preferably, either as an isolated polynucleotide (i.e. isolated from its natural context such as a gene locus) or in genetically modified or exogenously (i.e. artificially) manipulated form. An isolated polynucleotide can, for example, comprise less than approximately 5 kb, 4 kb, 3 kb, 2 kb, 1 kb, 0.5 kb or 0.1 kb of nucleotide sequences which naturally flank the nucleic acid molecule in the genomic DNA of the cell from which the nucleic acid is derived. The polynucleotide, preferably, is double or single stranded DNA including cDNA or RNA. The term encompasses single- as well as double-stranded polynucleotides. Moreover, comprised are also chemically modified polynucleotides including naturally occurring modified polynucleotides such as glycosylated or methylated polynucleotides or artificial modified ones such as biotinylated polynucleotides. Further variant polynucleotides encompass peptide nucleic acids (PNAs). Such a PNA, preferably, comprises a peptide moiety chemically linked to a polynucleotide having a nucleic acid sequence of a polynucleotide of the present invention or a fragment thereof.

[0103] The polynucleotide encoding a polypeptide having a biological activity as specified encompassed by the present invention is also, preferably, a polynucleotide having a nucleic acid sequence which has been adapted to the specific codon-usage of the organism, e.g., the plant species, in which the polynucleotide shall be expressed (i.e. the target organism). This is, in general, achieved by changing the codons of a nucleic acid sequence obtained from a first organism (i.e. the donor organism) encoding a given amino acid sequence into the codons normally used by the target organism whereby the amino acid sequence is retained. It is in principle acknowledged that the genetic code is redundant (i.e. degenerated). Specifically, 61 codons are used to encode only 20 amino acids. Thus, a majority of the 20 amino acids will be encoded by more than one codon. The codons for the amino acids are well known in the art and are universal to all organisms. However, among the different codons which may be used to encode a given amino acid, each organism may preferably use certain codons. The presence of rarely used codons in a nucleic acid sequence will result a depletion of the respective tRNA pools and, thereby, lower the translation efficiency. Thus, it may be advantageous to provide a polynucleotide comprising a nucleic acid sequence encoding a polypeptide as referred to above wherein said nucleic acid sequence is optimized for expression in the target organism with respect to the codon usage. In order to optimize the codon usage for a target organism, a plurality of known genes from the said organism may be investigated for the most commonly used codons encoding the amino acids. In a subsequent step, the codons of a nuclei acid sequence from the donor organism will be optimized by replacing the codons in the donor sequence by the codons most commonly used by the target organism for encoding the same amino acids. It is to be understood that if the same codon is used preferably by both organisms, no replacement will be necessary. For various target organisms, tables with the preferred codon usages are already known in the art; see e.g., http://www.kazusa.or.jp/Kodon/E.html. Moreover, computer programs exist for the optimization, e.g., the Leto software, version 1.0 (Entelechon GmbH, Germany) or the GeneOptimizer (Geneart AG, Germany). For the optimization of a nucleic acid sequence, several criteria may be taken into account. For example, for a given amino acid, always the most commonly used codon may be selected for each codon to be exchanged.

[0104] Alternatively, the codons used by the target organism may replace those in a donor sequence according to their naturally frequency. Accordingly, at some positions even less commonly used codons of the target organism will appear in the optimized nucleic acid sequence. The distribution of the different replacment codons of the target organism to the donor nucleic acid sequence may be randomly. Preferred target organisms in accordance with the present invention are soybean or canola (Brassica) species. Preferably, the polynucleotide of the present invention has an optimized nucleic acid for codon usage in the envisaged target organism wherein at least 20%, at least 40%, at least 60%, at least 80% or all of the relevant codons are adopted.

[0105] It has been found in the studies underlying the present invention that the polypeptides being encoded by the polynucleotides of the present invention have the aforementioned biological activities. Moreover, the polypeptides encoded by the polynucleotides of the present invention are, advantageously, capable of altering and, more specifically, increasing the amount of seed storage compounds in plants significantly. Thus, the polynucleotides of the present invention are, in principle, useful for the synthesis of seed storage compounds such as fatty acids, oils or lipids. Moreover, they may be used to generate transgenic plants or seeds thereof having a modified, preferably increased, amount of seed storage compounds. Such transgenic plants or seeds may be used for the manufacture of seed oil or other lipid, oil and/or fatty acid containing compositions.

[0106] Further, the present invention relates to vector comprising the polynucleotide of the present invention. Preferably, the vector is an expression vector.

[0107] The term “vector”, preferably, encompasses phage, plasmid, viral or retroviral vectors as well as artificial chromosomes, such as bacterial or yeast artificial chromosomes. Moreover, the term also relates to targeting constructs which allow for random or site-directed integration of the targeting construct into genomic DNA. Such target constructs, preferably, comprise DNA of sufficient length for either homolgous recombination or heterologous insertion as described in detail below. The vector encompassing the polynucleotides of the present invention, preferably, further comprises selectable markers for propagation and/or selection in a host. The vector may be incorporated into a host cell by various techniques well known in the art. If introduced into a host cell, the vector may reside in the cytoplasm or may be incorporated into the genome. In the latter case, it is to be understood that the vector may further comprise nucleic acid sequences which allow for homologous recombination or heterologous insertion, see below. Vectors can be introduced into prokaryotic or eukaryotic cells via conventional transformation or transfection techniques. An “expression vector” according to the present invention is characterized in that it comprises an expression control sequence such as promoter and/or enhancer sequence operatively linked to the polynucleotide of the present invention Preferred vectors, expression vectors and transformation or transfection techniques are specified elsewhere in this specification in detail.

[0108] Furthermore, the present invention encompasses a host cell comprising the polynucleotide or vector of the present invention.

[0109] Host cells are primary cells or cell lines derived from multicellular organisms such as plants or animals. Furthermore, host cells encompass prokaryotic or eukaryotic single cell organisms (also referred to as microorganisms), e.g. bacteria or fungi including yeast or bacteria. Primary cells or cell lines to be used as host cells in accordance with the present invention may be derived from the multicellular organisms, preferably from plants. Specifically preferred host cells, microorganisms or multicellular organism from which host cells may be obtained are disclosed below.

[0110] The polynucleotides or vectors of the present invention may be incorporated into a host cell or a cell of a transgenic non-human organism by heterologous insertion or homologous recombination. “Heterologous” as used in the context of the present invention refers to a polynucleotide which is inserted (e.g., by ligation) or is manipulated to become inserted to a nucleic acid sequence context which does not naturally encompass the said polynucleotide, e.g., an artificial nucleic acid sequence in a genome of an organism. Thus, a heterologous polynucleotide is not endogenous to the cell into which it is introduced, but has been obtained from another cell. Preferably, such heterologous polynucleotides encode proteins which are normally not produced by the cell expressing the said heterologous polynucleotide. An expression control sequence as used in a targeting construct or expression vector is considered to be “heterologous” in relation to another sequence (e.g., encoding a marker sequence or an agronomically relevant trait) if said two sequences are either not combined or operatively linked in a different way in their natural environment. Preferably, said sequences are not operatively linked in their natural environment (i.e. originate from different genes). Most preferably, said regulatory sequence is covalently joined (i.e. ligated) and adjacent to a nucleic acid to which it is not adjacent in its natural environment. “Homologous” as used in accordance with the present invention relates to the insertion of a polynucleotide in the sequence context in which the said polynucleotide naturally occurs. Usually, a heterologous polynucleotide is also incorporated into a cell by homologous recombination. To this end, the heterologous polynucleotide is flanked by nucleic acid sequences being homologous to a target sequence in the genome of a host cell or a non-human organism. Homologous recombination now occurs between the homologous sequences. However, as a result of the homologous recombination of the flanking sequences, the heterologous polynucleotide will be inserted, too. How to prepare suitable target constructs for homologous recombination and how to carry out the said homologous recombination is well known in the art.

[0111] Also provided in accordance with the present invention is a method for the manufacture of a polypeptide having the biological activity of a polypeptide encoded by a polynucleotide of the present invention comprising:

[0112] (a) expressing the polynucleotide of the present invention in a host cell; and

[0113] (b) obtaining the polypeptide encoded by said polynucleotide from the host cell.

[0114] The polypeptide may be obtained, for example, by all conventional purification techniques including affinity chromatography, size exclusion chromatography, high pressure liquid chromatography (HPLC) and precipitation techniques including antibody precipitation. It is to be understood that the method may—although preferred—not necessarily yield an essentially pure preparation of the polypeptide. It is to be understood that depending on the host cell which is used for the aforementioned method, the polypeptides produced thereby may become post-translationally modified or processed otherwise.

[0115] The present invention, moreover, pertains to a polypeptide encoded by the polynucleotide of the present invention or which is obtainable by the aforementioned method of the present invention.

[0116] The term “polypeptide” as used herein encompasses essentially purified polypeptides or polypeptide preparations comprising other proteins in addition. Further, the term also relates to the fusion proteins or polypeptide fragments being at least partially encoded by the polynucleotide of the present invention referred to above. Moreover, it includes chemically modified polypeptides. Such modifications may be artificial modifications or naturally occurring modifications such as phosphorylation, glycosylation, myristylation and the like. The terms “polypeptide”, “peptide” or “protein” are used interchangeable throughout this specification. The polypeptide of the present invention shall exhibit the biological activities referred to above and, more preferably, it shall be capable of increasing the amount of seed storage compounds, preferably, fatty acids, oil or lipids, when present in plant seeds as referred to above. Most preferably, if present in plant seeds, the polypeptide shall be capable of significantly increasing the seed storage of fatty acids, lipids or oil as described in the accompanying Examples below.

[0117] Encompassed by the present invention is, furthermore, an antibody which specifically recognizes the polypeptide of the invention.

[0118] Antibodies against the polypeptides of the invention can be prepared by well known methods using a purified polypeptide according to the invention or a suitable fragment derived therefrom as an antigen. A fragment which is suitable as an antigen may be identified by antigenicity determining algorithms well known in the art. Such fragments may be obtained either from the polypeptide of the invention by proteolytic digestion or may be a synthetic peptide. Preferably, the antibody of the present invention is a monoclonal antibody, a polyclonal antibody, a single chain antibody, a human or humanized antibody or primatized, chimerized or fragment thereof. Also comprised as an antibody by the present invention is a bispecific antibody, a synthetic antibody, an antibody fragment, such as Fab, Fv or scFv fragments etc., or a chemically modified derivative of any of these. The antibody of the present invention shall specifically bind to the polypeptide of the invention, i.e. it shall not significantly cross react with other polypeptides or peptides. Specific binding can be tested by various well known techniques. Antibodies or fragments thereof can be obtained by using methods which are described, e.g., in Harlow and Lane “Antibodies, A Laboratory Manual”, CSH Press, Cold Spring Harbor, 1988. Monoclonal antibodies can be prepared by the techniques originally described in Köhler and Milstein, Nature 256 (1975), 495, and Galfré, Meth. Enzymol. 73 (1981), 3, which comprise the fusion of mouse myeloma cells to spleen cells derived from immunized mammals. The antibodies can be used, for example, for the immunoprecipitation, immunolocalization or purification (e.g., by affinity chromatography) of the polypeptides of the invention as well as for the monitoring of the presence of said variant polypeptides, for example, in recombinant organisms, and for the identification of compounds interacting with the proteins according to the invention.

[0119] The present invention also relates to a transgenic non-human organism comprising the polynucleotide, the vector or the host cell of the present invention. Preferably, said non-human transgenic organism is a plant.

[0120] The term “non-human transgenic organism”, preferably, relates to a plant, an animal or a multicellular microorganism. The polynucleotide or vector may be present in the cytoplasm of the organism or may be incorporated into the genome either heterologous or by homologous recombination. Host cells, in particular those obtained from plants or animals, may be introduced into a developing embryo in order to obtain mosaic or chimeric organisms, i.e. non-human transgenic organisms comprising the host cells of the present invention. Preferably, the non-human transgenic organism expresses the polynucleotide of the present invention in order to produce the polypeptide in an amount resulting in a detectable biological activity specified elsewhere herein. Suitable transgenic organisms are, preferably, all those organisms which are capable of synthesizing fatty acids or lipids. Preferred organisms and methods for transgenesis are disclosed in detail below. A transgenic organism or tissue may comprise one or more transgenic cells. Preferably, the organism or tissue is substantially consisting of transgenic cells (i.e., more than 80%, preferably 90%, more preferably 95%, most preferably 99% of the cells in said organism or tissue are transgenic). The term “transgene” as used herein refers to any nucleic acid sequence, which is introduced into the genome of a cell or which has been manipulated by experimental manipulations including techniques such as chimeraplasty or genoplasty. Preferably, said sequence is resulting in a genome which is significantly different from the overall genome of an organism (e.g., said sequence, if endogenous to said organism, is introduced into a location different from its natural location, or its copy number is increased or decreased). A transgene may comprise an endogenous polynucleotide (i.e. a polynucleotide having a nucleic acid sequence obtained from the same organism or host cell) or may be obtained from a different organism or host cell, wherein said different organism is, preferably an organism of another species and the said different host cell is, preferably, a different microorganism, a host cell of a different origin or derived from a an organism of a different species.

[0121] Particularly preferred as plants to be used in accordance with the present invention are oil producing plant species. Most preferably, the said plant is selected from the group consisting of canola, linseed, soybean, sunflower, maize, oat, rye, barley, wheat, rice, pepper, tagetes, cotton, oil palm, coconut palm, flax, castor and peanut,

[0122] The present invention relates to a method for the manufacture of a lipid, an oil and/or a fatty acid comprising the steps of:

[0123] (a) cultivating the host cell or the transgenic non-human organism of the present invention under conditions allowing synthesis of the said lipid or fatty acid; an

[0124] (b) obtaining the said lipid, oil and/or fatty acid from the host cell or the transgenic non-human organism.

[0125] The term “lipid” and “fatty acid” as used herein refer, preferably, to those recited in Table 1 (for lipids) and Table 2 (for fatty acids), below. However, the terms, in principle, also encompass other lipids or fatty acids which can be obtained by the lipid metabolism in a host cell or an organism referred to in accordance with the present invention.

[0126] In a preferred embodiment of the aforementioned method of the present invention, the said lipid and/or fatty acids constitute seed oil.

[0127] Moreover, the present invention pertains to a method for the manufacture of a plant having a modified amount of a seed storage compound, preferably a lipid, an oil or a fatty acid, comprising the steps of:

[0128] (a) introducing the polynucleotide or the vector of the present invention into a plant cell; and

[0129] (b) generating a transgenic plant from the said plant cell, wherein the polypeptide encoded by the polynucleotide modifies the amount of the said seed storage compound in the transgenic plant.

[0130] The term “seed storage compound” as used herein, preferably, refers to compounds being a sugar, a protein, or, more preferably, a lipid, an oil or a fatty acid. Preferably, the amount of said seed storage compound is significantly increased compared to a control, preferably an empty vector control as specified above. The increase is, more preferably, an increase in the amount by weight of at least 1, 2.5, 5, 7.5, 10, 12.5, 15, 17.5, 20, 22.5 or 25% as compared to a control.

[0131] It is to be understood that the polynucleotides or the vector referred to in accordance with the above method of the present invention may be introduced into the plant cell by any of the aforementioned insertion or recombination techniques.

[0132] The aforementioned method of the present invention may be also used to manufacture a plant having altered total oil content in its seeds or a plant having a altered total seed oil content and altered levels of seed storage compounds in its seeds. Such plants are suitable sources for seed oil and may be used for the large scale manufacture thereof.

[0133] Further preferred embodiments of the compounds, methods and uses according to the present invention are described in the following. Moreover, the terms used above will be explained in more detail. The polynucleotides and polypeptides of the present invention are also referred to as Lipid Metabolism proteins (LMP) herein below.

[0134] The present invention provides novel isolated nucleic acid and amino acid sequences, i.e. the polynucleotides and polypeptides of the present invention, associated with the metabolism of seed storage compounds in plants.

[0135] The present invention, thus, preferably provides an nucleic acid from Brassica napus, Vernonia, Linum usitatissimum, Helianthus annuus, Zea mays, or Glycine max encoding a Lipid Metabolism Protein (LMP), or a portion thereof. These sequences may be used to modify or increase lipids and fatty acids, cofactors, and enzymes in microorganisms and plants, in particular as set forth above.

[0136] Arabidopsis plants are known to produce considerable amounts of fatty acids, like linoleic and linolenic acid (see, e.g., Table 2), and for their close similarity in many aspects (gene homology etc.) to the oil crop plant Brassica. Therefore, nucleic acid molecules originating from a plant like Brassica napus, Vernonia, Linum usitatissimum, Helianthus annuus, Zea mays, or Glycine max or related organisms, are especially suited to modify the lipid and fatty acid metabolism in a host such as the host cells or transgenic non-human organisms of the present invention, especially in microorganisms and plants. Furthermore, nucleic acids from the plant Brassica napus, Vernonia, Linum usitatissimum, Helianthus annuus, Zea mays, or Glycine max or related organisms, can be used to identify those DNA sequences and enzymes in other species, which are useful to modify the biosynthesis of precursor molecules of fatty acids in the respective organisms.

[0137] The present invention further provides an nucleic acid comprising a fragment of at least 15 nucleotides of a polynucleotide of the present invention, preferably, a polynucleotide comprising a nucleic acid from a plant (Brassica napus, Vernonia, Linum usitatissimum, Helianthus annuus, Zea mays, or Glycine max) encoding the polypeptide of the present invention.

[0138] The present invention, thus, also encompasses an oligonucleotide which specifically binds to the polynucleotides of the present invention. Binding as meant in this context refers to hybridization by Watson-Crick base pairing discussed elsewhere in the specification in detail. An oligonucleotide as used herein has a length of at most 100, at most 50, at most 40, at most 30 or at most 20 nucleotides in length which are complementary to the nucleic acid sequence of the polynucleotides of the present invention. The sequence of the oligonucleotide is, preferably, selected so that a perfect match by Watson-Crick base pairing will be obtained. The oligonucleotides of the present invention may be suitable as primers for PCR-based amplification techniques. Moreover, the oligonucleotides may be used for RNA interference (RNAi) approaches in order to modulate and, preferably down-regulate, the activity of the polypeptides encoded by the polynucleotides of the present invention. Thereby, an organism may be depleted of fatty acids and/or lipids and, specifically, a plant seed may be depleted of at least some of its seed storage compounds. As used herein, the term “RNA interference (RNAi)” refers to selective intracellular degradation of RNA used to silence expression of a selected target gene, i.e. the polynucleotide of the present invention. RNAi is a process of sequence-specific, post-transcriptional gene silencing in organisms initiated by double-stranded RNA (dsRNA) that is homologous in sequence to the gene to be silenced. The RNAi technique involves small interfering RNAs (siRNAs) that are complementary to target RNAs (encoding a gene of interest) and specifically destroy the known mRNA, thereby diminishing or abolishing gene expression. RNAi is generally used to silence expression of a gene of interest by targeting mRNA, however, any type of RNA is encompassed by the RNAi methods of the invention. Briefly, the process of RNAi in the cell is initiated by long double stranded RNAs (dsRNAs) being cleaved by a ribonuclease, thus producing siRNA duplexes. The siRNA binds to another intracellular enzyme complex which is thereby activated to target whatever mRNA molecules are homologous (or complementary) to the siRNA sequence. The function of the complex is to target the homologous mRNA molecule through base pairing interactions between one of the siRNA strands and the target mRNA. The mRNA is then cleaved approximately 12 nucleotides from the 3′ terminus of the siRNA and degraded. In this manner, specific mRNAs can be targeted and degraded, thereby resulting in a loss of protein expression from the targeted mRNA. A complementary nucleotide sequence as used herein refers to the region on the RNA strand that is complementary to an RNA transcript of a portion of the target gene. The term “dsRNA” refers to RNA having a duplex structure comprising two complementary and anti-parallel nucleic acid strands. Not all nucleotides of a dsRNA necessarily exhibit complete Watson-Crick base pairs; the two RNA strands may be substantially complementary. The RNA strands forming the dsRNA may have the same or a different number of nucleotides, with the maximum number of base pairs being the number of nucleotides in the shortest strand of the dsRNA. Preferably, the dsRNA is no more than 49, more preferably less than 25, and most preferably between 19 and 23, nucleotides in length. dsRNAs of this length are particularly efficient in inhibiting the expression of the target gene using RNAi techniques. dsRNAs are subsequently degraded by a ribonuclease enzyme into short interfering RNAs (siRNAs). RNAi is mediated by small interfering RNAs (siRNAs). The term “small interfering RNA” or “siRNA” refers to a nucleic acid molecule which is a double stranded RNA agent that is complementary to i.e., able to base-pair with, a portion of a target RNA (generally mRNA), i.e. the polynucleotide of the present invention being RNA. siRNA acts to specifically guide enzymes in the host cell to cleave the target RNA. By virtue of the specificity of the siRNA sequence and its homology to the RNA target, siRNA is able to cause cleavage of the target RNA strand, thereby inactivating the target RNA molecule. Preferably, the siRNA which is sufficient to mediate RNAi comprises a nucleic acid sequence comprising an inverted repeat fragment of the target gene and the coding region of the gene of interest (or portion thereof). Also preferably, a nucleic acid sequence encoding a siRNA comprising a sequence sufficiently complementary to a target gene is operatively linked to a expression control sequence. Thus, the mediation of RNAi to inhibit expression of the target gene can be modulated by said expression control sequence. Preferred expression control sequences are those which can be regulated by a exogenous stimulus, such as the tet operator whose activity can be regulated by tetracycline or heat inducible promoters. Alternatively, an expression control sequence may be used which allows tissue-specific or expression of the siRNA or expression at defined timepoints in development. The complementary regions of the siRNA allow sufficient hybridization of the siRNA to the target RNA and thus mediate RNAi. In mammalian cells, siRNAs are approximately 21-25 nucleotides in length (see Tuschl et al. 1999 and Elbashir et al. 2001). The siRNA sequence needs to be of sufficient length to bring the siRNA and target RNA together through complementary base-pairing interactions. The siRNA used with a seed specific expression system e.g. under control of the USP promoter of the invention may be of varying lengths. The length of the siRNA is preferably greater than or equal to ten nucleotides and of sufficient length to stably interact with the target RNA; specifically 15-30 nucleotides; more specifically any integer between 15 and 30 nucleotides, most preferably 15, 16, 17, 18, 19, 20, 21, 22, 23, 24, 25, 26, 27, 28, 29, and 30. By “sufficient length” is meant an oligonucleotide of greater than or equal to 15 nucleotides that is of a length great enough to provide the intended function under the expected condition. By “stably interact” is meant interaction of the small interfering RNA with target nucleic acid (e.g., by forming hydrogen bonds with complementary nucleotides in the target under physiological conditions). Generally, such complementarity is 100% between the siRNA and the RNA target, but can be less if desired, preferably 91%, 92%, 93%, 94%, 95%, 96%, 97%, 98%, or 99%. For example, 19 bases out of 21 bases may be base-paired. In some instances, where selection between various allelic variants is desired, 100% complementary to the target gene is required in order to effectively discern the target sequence from the other allelic sequence. When selecting between allelic targets, choice of length is also an important factor because it is the other factor involved in the percent complementary and the ability to differentiate between allelic differences. Methods relating to the use of RNAi to silence genes in organisms, including C. elegans, Drosophila, plants, and mammals, are known in the art (see, for example, Fire et al., Nature (1998) 391:806-811; Fire, Trends Genet. 15, 358-363 (1999); Sharp, RNA interference 2001. Genes Dev. 15,485-490 (2001); Hammond et al. Nature Rev. Genet. 2, 1110-1119 (2001); Tuschl, Chem. Biochem. 2, 239-245 (2001); Hamilton et al., Science 286, 950-952 (1999); Hammond et al., Nature 404, 293-296 (2000); Zamore et al., Cell 101, 25-33 (2000); Bernstein et al., Nature 409, 363-366 (2001); Elbashir et al., Genes Dev. 15, 188-200 (2001); WO 0129058; WO 09932619; and Elbashir et al., 2001 Nature 411: 494-498). Preferably, the oligonucleotides used for RNAi approaches are selected from the 5′ or 3′ untranslated region of a cDNA corresponding to a polynucleotide of the present invention.

[0139] Also in a preferred embodiment, the oligonucleotide of the present invention can be used for the generation of or as a micro RNA (miRNA). These miRNAs are single-stranded RNA molecules of preferably 20 to 25, more preferably 21 to 23 nucleotides in length capable of regulating gene expression. miRNAs are physiologically encoded by genes that are transcribed from DNA but not translated into protein (non-coding RNA). Rather, they are processed from primary transcripts known as pri-miRNA to short stem-loop structures called pre-miRNA and finally to functional miRNA. The mature miRNA molecules are partially complementary to one or more messenger RNA (mRNA) molecules. Due to this complementary regions, they are capable of binding to a given target mRNA and to subsequently down-regulate expression thereof. Preferably, miRNAs to be used in accordance with the present invention comprise sequence stretches complementary to the polynucleotide sequences of the present invention referred to above. More preferably, the sequence stretches are between 20 and 30 nucleotides, more preferably, between 20 and 25 nucleotides and, most preferably, between 21 and 23 nucleotides in length. The miRNAs, preferably, are capable of binding to complementary sequences of the coding regions or of the 3′or the 5′UTR sequences of the polynucleotides of the invention.

[0140] More preferably, the oligonucleotide of the present invention, thus, comprises a sequence of at least 15 nucleotides in length complementary to the nucleic acid sequence of the polynucleotide of the invention. Most preferably, the said oligonucleotide is capable of down regulating the expression of the said polynucleotide, preferably either by functioning as a double stranded RNAi molecule or as a single stranded miRNA molecule.

[0141] Downregulation as meant herein relates to a statistically significant reduction of the mRNA detectable in a cell, tissue or organism or even to a failure to produce mRNA in detectable amounts at all. This also includes the reduction of of the stability of mRNA encoding all or a part of any sequence described herein. Moreover, downregulation also encompasses an impaired, i.e. significantly reduced, production of protein from RNA sequences encoding all or a part of any sequence or even the absence of detectable protein production.

[0142] Overepxression as meant herein relates to a statistically increased mRNA detectable in a cell, tissue or organism. This increased amount of detectable mRNA may be the result of increased mRNA production or stability. Moreover, also encompassed is an increased amount of active protein encoded by the nucleotide sequence in general.

[0143] Also provided by the present invention are polypeptides encoded by the nucleic acids, and heterologous polypeptides comprising polypeptides encoded by the nucleic acids, and antibodies to those polypeptides.

[0144] Additionally, the present invention relates to, and provides the use of the polynucleotides of the present invention in the production of transgenic plants having a modified level or composition of a seed storage compound. In regard to an altered composition, the present invention can be used, for example, to increase the percentage of oleic acid relative to other plant oils. A method of producing a transgenic plant with a modified level or composition of a seed storage compound includes the steps of transforming a plant cell with an expression vector comprising an LMP nucleic acid and generating a plant with a modified level or composition of the seed storage compound from the plant cell. In a preferred embodiment, the plant is an oil-producing species selected from the group consisting of, for example, canola, linseed, soybean, sunflower, maize, oat, rye, barley, wheat, rice, pepper, tagetes, cotton, oil palm, coconut palm, flax, castor, and peanut.

[0145] According to the present invention, the compositions and methods described herein can be used to alter the composition of an LMP in a transgenic plant and to increase or decrease the level of an LMP in a transgenic plant comprising increasing or decreasing the expression of an LMP nucleic acid in the plant. Increased or decreased expression of the LMP nucleic acid can be achieved through transgenic overexpression, cosuppression approaches, antisense approaches, and in vivo mutagenesis of the LMP nucleic acid. The present invention can also be used to increase or decrease the level of a lipid in a seed oil, to increase or decrease the level of a fatty acid in a seed oil, or to increase or decrease the level of a starch in a seed or plant.

[0146] More specifically, the present invention includes, and provides a method for, altering (increasing or decreasing or changing the specific profile of) the total oil content in a seeds comprising: Transforming a plant with a nucleic acid construct that comprises, as operably-linked components, a promoter and a polynucleotide according to the present invention, and growing the plant. Furthermore, the present invention includes, and provides a method for, altering (increasing or decreasing) the level of oleic acid in a seed comprising: Transforming a plant with a nucleic acid construct that comprises as operably linked components, a promoter, a structural nucleic acid sequence capable of altering (increasing or decreasing) the level of oleic acid, and growing the plant.

[0147] Also included herein is a seed produced by a transgenic plant transformed by an LMP DNA sequence, wherein the seed contains the LMP DNA sequence, and wherein the plant is true breeding for a modified level of a seed-storage compound. The present invention additionally includes a seed oil produced by the aforementioned seed.

[0148] Further provided by the present invention are vectors comprising the nucleic acids, host cells containing the vectors, and descendent plant materials produced by transforming a plant cell with the nucleic acids and/or vectors.

[0149] According to the present invention, the compounds, compositions, and methods described herein can be used to increase or decrease the relative percentages of a lipid in a seed oil, increase or decrease the level of a lipid in a seed oil, or to increase or decrease the level of a fatty acid in a seed oil, or to increase or decrease the level of a starch or other carbohydrate in a seed or plant, or to increase or decrease the level of proteins in a seed or plant. The manipulations described herein can also be used to improve seed germination and growth of the young seedlings and plants and to enhance plant yield of seed storage compounds.

[0150] It is further provided a method of producing a higher or lower than normal or typical level of storage compound in a transgenic plant expressing an LMP nucleic acid from Brassica napus, Vernonia, Linum usitatissimum, Helianthus annuus, Zea mays, or Glycine max in the transgenic plant, wherein the transgenic plant may be any plant such as Arabidopsis thaliana, Brassica napus, Glycine max, Oryza sativa, Zea mays, Triticum aestivum, Hordeum vulgare, Linum usitatissimum, Helianthus anuus, or Beta vulgaris or a species different from Arabidopsis thaliana, Brassica napus, or Glycine max. Also included herein are compositions and methods of the modification of the efficiency of production of a seed storage compound.

[0151] Accordingly, it is an object of the present invention to provide novel isolated LMP nucleic acids and isolated LMP amino acid sequences from Brassica napus, Vernonia, Linum usitatissimum, Helianthus annuus, Zea mays, or Glycine max, as well as active fragments, analogs, and orthologs thereof. Those active fragments, analogs, and orthologs can also be from different plant species, as one skilled in the art will appreciate that other plant species will also contain those or related nucleic acids.

[0152] It is another object of the present invention to provide transgenic plants having modified levels of seed storage compounds, and, in particular, modified levels of a lipid, a fatty acid, or a sugar.

[0153] The polynucleotides and polypeptides of the present invention, including agonists and/or fragments thereof, have also uses that include modulating plant growth, and potentially plant yield, preferably increasing plant growth under adverse conditions (drought, cold, light, UV). In addition, antagonists of the present invention may have uses that include modulating plant growth and/or yield through preferably increasing plant growth and yield. In yet another embodiment, over-expression polypeptides of the present invention, using a constitutive promoter, may be useful for increasing plant yield under stress conditions (drought, light, cold, UV) by modulating light-utilization efficiency. Moreover, polynucleotides and polypeptides of the present invention will improve seed germination and seed dormancy and, hence, will improve plant growth and/or yield of seed storage compounds.

[0154] The polynucleotides of the present invention may further comprise an operably linked promoter or partial promoter region. The promoter can be a constitutive promoter, an inducible promoter, or a tissue-specific promoter. The constitutive promoter can be, for example, the super promoter (Ni et al., Plant J. 7:661-676, 1995; U.S. Pat. No. 5,955,646). The tissue-specific promoter can be active in vegetative tissue or reproductive tissue. The tissue-specific promoter active in reproductive tissue can be a seed-specific promoter. The tissue-specific promoter active in vegetative tissue can be a root-specific, shoot-specific, meristem-specific or leaf-specific promoter. The isolated nucleic acid molecule of the present invention can still further comprise a 5′ non-translated sequence, 3′ non-translated sequence, introns, or the combination thereof.

[0155] The present invention also provides a method for increasing the number and/or size or density of one or more plant organs of a plant expressing a polynucleotide of the invention encoding a Lipid Metabolism Protein (LMP), or a portion thereof. More specifically, seed size, and/or seed number and/or weight, might be manipulated. Moreover, root length or density can be increased. Longer or denser roots can alleviate not only the effects of water depletion from soil but also improve plant anchorage/standability, thus reducing lodging. Also, longer or denser roots have the ability to cover a larger volume of soil and improve nutrient uptake. All of these advantages of altered root architecture have the potential to increase crop yield. Additionally, the number and size of leaves might be increased by the nucleic acid sequences provided in this application. This will have the advantage of improving photosynthetic light-utilization efficiency by increasing photosynthetic light-capture capacity and photosynthetic efficiency.

[0156] It is a further object of the present invention to provide methods for producing such aforementioned transgenic plants.

[0157] It is another object of the present invention to provide seeds and seed oils from such aforementioned transgenic plants.

[0158] Before the present compounds, compositions, and methods are disclosed and described, it is to be understood that this invention is not limited to specific nucleic acids, specific polypeptides, specific cell types, specific host cells, specific conditions, or specific methods, etc., as such may, of course, vary, and the numerous modifications and variations therein will be apparent to those skilled in the art. It is also to be understood that the terminology used herein is for the purpose of describing particular embodiments only and is not intended to be limiting. As used in the specification and in the claims, “a” or “an” can mean one or more, depending upon the context in which it is used. Thus, for example, reference to “a cell” can mean that at least one cell can be utilized.

[0159] The present invention is based, in part, on the isolation and characterization of nucleic acid molecules encoding Lipid Metabolism Proteins (LMPs) from plants including canola (Brassica napus), soybean (Glycine max), sunflower (Helianthus annuus), maize (Zea Mays) and linseed (Linum usitatissimum) and other related crop species like rice, wheat, maize, barley, linseed, sugar beat or sunflower.

[0160] In accordance with the purpose(s) of this invention, as embodied and broadly described herein, this invention, in one aspect, provides an isolated nucleic acid from a plant (Brassica napus, Vernonia, Linum usitatissimum, Helianthus annuus, Zea mays, or Glycine max) encoding a LMP, or a portion thereof.

[0161] One aspect of the invention pertains to isolated nucleic acid molecules that encode LMP polypeptides or biologically active portions thereof, as well as nucleic acid fragments sufficient for use as hybridization probes or primers for the identification or amplification of an LMP-encoding nucleic acid (e.g., LMP DNA). As used herein, the term “nucleic acid molecule” is intended to include DNA molecules (e.g., cDNA or genomic DNA) and RNA molecules (e.g., mRNA) and analogs of the DNA or RNA generated using nucleotide analogs. This term also encompasses untranslated sequence located at both the 3′ and 5′ ends of the coding region of a gene: at least about 1000 nucleotides of sequence upstream from the 5′ end of the coding region and at least about 200 nucleotides of sequence downstream from the 3′ end of the coding region of the gene. The nucleic acid molecule can be single-stranded or double-stranded, but preferably is double-stranded DNA. An “isolated” nucleic acid molecule is one, which is substantially separated from other nucleic acid molecules, which are present in the natural source of the nucleic acid. Preferably, an “isolated” nucleic acid is substantially free of sequences that naturally flank the nucleic acid (i.e., sequences located at the 5′ and 3′ ends of the nucleic acid) in the genomic DNA of the organism, from which the nucleic acid is derived. For example, in various embodiments, the isolated LMP nucleic acid molecule can contain less than about 5 kb, 4 kb, 3 kb, 2 kb, 1 kb, 0.5 kb or 0.1 kb of nucleotide sequences which naturally flank the nucleic acid molecule in genomic DNA of the cell from which the nucleic acid is derived (e.g., a Brassica napus, Glycine max or Linum usitatissimum cell). Moreover, an “isolated” nucleic acid molecule, such as a cDNA molecule, can be substantially free of other cellular material, or culture medium when produced by recombinant techniques, or chemical precursors or other chemicals when chemically synthesized.

[0162] A nucleic acid molecule of the present invention, e.g. a polynucleotide having a specific sequence as shown in the aforementioned SEQ ID NOs, can be isolated using standard molecular biology techniques and the sequence information provided herein. For example, an Brassica napus, Vernonia, Linum usitatissimum, Helianthus annuus, Zea mays, or Glycine max LMP cDNA can be isolated from an Brassica napus, Vernonia, Linum usitatissimum, Helianthus annuus, Zea mays, or Glycine max library using all or portion of one of the the aforementioned specific sequences as a hybridization probe and standard hybridization techniques (e.g., as described in Sambrook et al. 1989, Molecular Cloning: A Laboratory Manual. 2nd, ed., Cold Spring Harbor Laboratory, Cold Spring Harbor Laboratory Press, Cold Spring Harbor, N.Y.). Moreover, a nucleic acid molecule encompassing all or a portion of one of the said sequences can be isolated by the polymerase chain reaction using oligonucleotide primers designed based upon this sequence (e.g., a nucleic acid molecule encompassing all or a portion of one of the aforementioned specific sequences can be isolated by the polymerase chain reaction using oligonucleotide primers designed based upon this same sequence). For example, mRNA can be isolated from plant cells (e.g., by the guanidinium-thiocyanate extraction procedure of Chirgwin et al. 1979, Biochemistry 18:5294-5299) and cDNA can be prepared using reverse transcriptase (e.g., Moloney MLV reverse transcriptase, available from Gibco/BRL, Bethesda, Md.; or AMV reverse transcriptase, available from Seikagaku America, Inc., St. Petersburg, Fla.). Synthetic oligonucleotide primers for polymerase chain reaction amplification can be designed based upon one of the nucleotide sequences. A nucleic acid of the invention can be amplified using cDNA or, alternatively, genomic DNA, as a template and appropriate oligonucleotide primers according to standard PCR amplification techniques. The nucleic acid so amplified can be cloned into an appropriate vector and characterized by DNA sequence analysis. Furthermore, oligonucleotides corresponding to a LMP nucleotide sequence can be prepared by standard synthetic techniques, e.g., using an automated DNA synthesizer.

[0163] In a preferred embodiment, an isolated nucleic acid of the invention comprises one of the nucleotide sequences of a polynucleotide of the present invention referred to above. The specific sequences correspond to the Brassica napus, Vernonia, Linum usitatissimum, Helianthus annuus, Zea mays, or Glycine max LMP cDNAs of the invention. These cDNAs may comprise sequences encoding LMPs, as well as 5′ untranslated sequences and 3′ untranslated sequences. Alternatively, the nucleic acid molecules can comprise only the coding region or can contain whole genomic fragments isolated from genomic DNA.

[0164] In another preferred embodiment, an isolated nucleic acid molecule of the invention comprises a nucleic acid molecule, which is a complement of one of the specific nucleotide sequences or a portion thereof. A nucleic acid molecule which is complementary to one of the specific nucleotide sequences is one which is sufficiently complementary such that it can hybridize to one of the said nucleotide sequences, thereby forming a stable duplex.

[0165] In still another preferred embodiment, an isolated nucleic acid molecule of the invention comprises a nucleotide sequence which is at least about 50-60%, preferably at least about 60-70%, more preferably at least about 70-80%, 80-90%, or 90-95%, and even more preferably at least about 95%, 96%, 97%, 98%, 99% or more homologous to a specific nucleotide sequence referred to herein or a portion thereof. In an additional preferred embodiment, an isolated nucleic acid molecule of the invention comprises a nucleotide sequence which hybridizes, e.g., hybridizes under stringent conditions, to one of the said specific nucleotide sequences or a portion thereof. These hybridization conditions include washing with a solution having a salt concentration of about 0.02 molar at pH 7 at about 60° C.

[0166] Moreover, the nucleic acid molecule of the invention can comprise only a portion of the coding region of one of the specific sequences of the polynucleotides of the present invention, for example a fragment, which can be used as a probe or primer or a fragment encoding a biologically active portion of a LMP. The nucleotide sequences determined from the cloning of the LMP genes from Brassica napus, Vernonia, Linum usitatissimum, Helianthus annuus, Zea mays, or Glycine max allows for the generation of probes and primers designed for use in identifying and/or cloning LMP homologues in other cell types and organisms, as well as LMP homologues from other plants or related species. Therefore this invention also provides compounds comprising the nucleic acids disclosed herein, or fragments thereof. These compounds include the nucleic acids attached to a moiety. These moieties include, but are not limited to, detection moieties, hybridization moieties, purification moieties, delivery moieties, reaction moieties, binding moieties, and the like. The probe/primer typically comprises substantially purified oligonucleotide. The oligonucleotide typically comprises a region of nucleotide sequence that hybridizes under stringent conditions to at least about 12, preferably about 25, more preferably about 40, 50 or 75 consecutive nucleotides of a sense strand of one of the specific sequences set forth herein, an anti-sense sequence of one of the said sequences, or naturally occurring mutants thereof. Primers based on a nucleotide sequence of a polynucleotide of the invention can be used in PCR reactions to clone LMP homologues. Probes based on the LMP nucleotide sequences can be used to detect transcripts or genomic sequences encoding the same or homologous proteins. In preferred embodiments, the probe further comprises a label group attached thereto, e.g. the label group can be a radioisotope, a fluorescent compound, an enzyme, or an enzyme co-factor. Such probes can be used as a part of a genomic marker test kit for identifying cells which express a LMP, such as by measuring a level of a LMP-encoding nucleic acid in a sample of cells, e.g., detecting LMP mRNA levels or determining whether a genomic LMP gene has been mutated or deleted.

[0167] In one embodiment, the nucleic acid molecule of the invention encodes a protein or portion thereof which includes an amino acid sequence which is sufficiently homologous to an amino acid encoded by a sequence of a polynucleotide of the present invention such that the protein or portion thereof maintains the same or a similar function as the wild-type protein. As used herein, the language “sufficiently homologous” refers to proteins or portions thereof which have amino acid sequences which include a minimum number of identical or equivalent (e.g., an amino acid residue, which has a similar side chain as an amino acid residue in one of the ORFs of a sequence of a polynucleotide of the present invention) amino acid residues to an amino acid sequence such that the protein or portion thereof is able to participate in the metabolism of compounds necessary for the production of seed storage compounds in plants, construction of cellular membranes in microorganisms or plants, or in the transport of molecules across these membranes.

[0168] As altered or increased sugar and/or fatty acid production is a general trait wished to be inherited into a wide variety of plants like maize, wheat, rye, oat, triticale, rice, barley, soybean, peanut, cotton, canola, manihot, pepper, sunflower, sugar beet and tagetes, solanaceous plants like potato, tobacco, eggplant, and tomato, Vicia species, pea, alfalfa, bushy plants (coffee, cacao, tea), Salix species, trees (oil palm, coconut) and perennial grasses and forage crops, these crop plants are also preferred target plants for genetic engineering as one further embodiment of the present invention.

[0169] Portions of proteins encoded by the LMP nucleic acid molecules of the invention are preferably biologically active portions of one of the LMPs. As used herein, the term “biologically active portion of a LMP” is intended to include a portion, e.g., a domain/ motif, of a LMP that participates in the metabolism of compounds necessary for the biosynthesis of seed storage lipids, or the construction of cellular membranes in microorganisms or plants, or in the transport of molecules across these membranes, or has an activity as set forth herein above. To determine whether a LMP or a biologically active portion thereof can participate in the metabolism of compounds necessary for the production of seed storage compounds and cellular membranes, an assay of enzymatic activity may be performed. Such assay methods are well known to those skilled in the art, and as described in the Exemplification.

[0170] Biologically active portions of a LMP include peptides comprising amino acid sequences derived from the amino acid sequence of a LMP (e.g., an amino acid sequence encoded by a nucleic acid of the present invention or the amino acid sequence of a protein homologous to a LMP, which include fewer amino acids than a full length LMP or the full length protein which is homologous to a LMP) and exhibit at least one activity of a LMP. Typically, biologically active portions (peptides, e.g., peptides which are, for example, 5, 10, 15, 20, 30, 35, 36, 37, 38, 39, 40, 50, 100 or more amino acids in length) comprise a domain or motif with at least one activity of a LMP. Moreover, other biologically active portions, in which other regions of the protein are deleted, can be prepared by recombinant techniques and evaluated for one or more of the activities described herein. Preferably, the biologically active portions of a LMP include one or more selected domains/motifs or portions thereof having biological activity.

[0171] Additional nucleic acid fragments encoding biologically active portions of a LMP can be prepared by isolating a portion of one of the sequences, expressing the encoded portion of the LMP or peptide (e.g., by recombinant expression in vitro) and assessing the activity of the encoded portion of the LMP or peptide.

[0172] The invention further encompasses nucleic acid molecules that differ from one of the specific nucleotide sequences shown in the SEQ ID NOs referred to above (and portions thereof) due to degeneracy of the genetic code and thus encode the same LMP as that encoded by the said specific nucleotide sequences. In a further embodiment, the nucleic acid molecule of the invention encodes a full length protein which is substantially homologous to an amino acid sequence of a polypeptide encoded by an open reading frame shown in the SEQ ID NOs. In one embodiment, the full-length nucleic acid or protein or fragment of the nucleic acid or protein is from Brassica napus, Vernonia, Linum usitatissimum, Helianthus annuus, Zea mays, or Glycine max

[0173] In addition to the specific Brassica napus, Vernonia, Linum usitatissimum, Helianthus annuus, Zea mays, or Glycine max LMP nucleotide sequences, it will be appreciated by those skilled in the art that DNA sequence polymorphisms that lead to changes in the amino acid sequences of LMPs may exist within a population (e.g., the Brassica napus, Vernonia, Linum usitatissimum, Helianthus annuus, Zea mays, or Glycine max population). Such genetic polymorphism in the LMP gene may exist among individuals within a population due to natural variation. As used herein, the terms “gene” and “recombinant gene” refer to nucleic acid molecules comprising an open reading frame encoding a LMP, preferably a Brassica napus, Vernonia, Linum usitatissimum, Helianthus annuus, Zea mays, or Glycine max LMP. Such natural variations can typically result in 1-40% variance in the nucleotide sequence of the LMP gene. Any and all such nucleotide variations and resulting amino acid polymorphisms in LMP that are the result of natural variation and that do not alter the functional activity of LMPs are intended to be within the scope of the invention.

[0174] Nucleic acid molecules corresponding to natural variants and non-Brassica napus, Vernonia, Linum usitatissimum, Helianthus annuus, Zea mays, or Glycine max orthologs of the Brassica napus, Vernonia, Linum usitatissimum, Helianthus annuus, Zea mays, or Glycine max LMP cDNA of the invention can be isolated based on their homology to Brassica napus, Vernonia, Linum usitatissimum, Helianthus annuus, Zea mays, or Glycine max LMP nucleic acid disclosed herein using the Brassica napus, Vernonia, Linum usitatissimum, Helianthus annuus, Zea mays, or Glycine max cDNA, or a portion thereof, as a hybridization probe according to standard hybridization techniques under stringent hybridization conditions. As used herein, the term “orthologs” refers to two nucleic acids from different species, but that have evolved from a common ancestral gene by specification. Normally, orthologs encode proteins having the same or similar functions. Accordingly, in another embodiment, an isolated nucleic acid molecule of the invention is at least 15 nucleotides in length and hybridizes under stringent conditions to the nucleic acid molecule comprising a nucleotide sequence of Appendix A. In other embodiments, the nucleic acid is at least 30, 50, 100, 250, or more nucleotides in length. As used herein, the term “hybridizes under stringent conditions” is intended to describe conditions for hybridization and washing under which nucleotide sequences at least 60% homologous to each other typically remain hybridized to each other. Preferably, the conditions are such that sequences at least about 65%, more preferably at least about 70%, and even more preferably at least about 75% or more homologous to each other typically remain hybridized to each other. Such stringent conditions are known to those skilled in the art and can be found in Current Protocols in Molecular Biology, John Wiley & Sons, N.Y., 1989: 6.3.1-6.3.6. A preferred, non-limiting example of stringent hybridization conditions are hybridization in 6X sodium chloride/sodium citrate (SSC) at about 45° C., followed by one or more washes in 0.2×SSC, 0.1% SDS at 50-65° C. Preferably, an isolated nucleic acid molecule of the invention that hybridizes under stringent conditions to a sequence of Appendix A corresponds to a naturally occurring nucleic acid molecule. As used herein, a “naturally-occurring” nucleic acid molecule refers to a RNA or DNA molecule having a nucleotide sequence that occurs in nature (e.g., encodes a natural protein). In one embodiment, the nucleic acid encodes a natural Brassica napus, Vernonia, Linum usitatissimum, Helianthus annuus, Zea mays, or Glycine max LMP.

[0175] In addition to naturally-occurring variants of the LMP sequence that may exist in the population, the skilled artisan will further appreciate that changes can be introduced by mutation into a specific nucleotide sequence referred to herein thereby leading to changes in the amino acid sequence of the encoded LMP, without altering the functional ability of the LMP. For example, nucleotide substitutions leading to amino acid substitutions at “non-essential” amino acid residues can be made in such a sequence. A “non-essential” amino acid residue is a residue that can be altered from the wild-type sequence of one of the LMPs without altering the activity of said LMP, whereas an “essential” amino acid residue is required for LMP activity. Other amino acid residues, however, (e.g., those that are not conserved or only semi-conserved in the domain having LMP activity) may not be essential for activity and thus are likely to be amenable to alteration without altering LMP activity.

[0176] Accordingly, another aspect of the invention pertains to nucleic acid molecules encoding LMPs that contain changes in amino acid residues that are not essential for LMP activity. Such LMPs differ in amino acid sequence from a sequence yet retain at least one of the LMP activities described herein. In one embodiment, the isolated nucleic acid molecule comprises a nucleotide sequence encoding a protein, wherein the protein comprises an amino acid sequence at least about 50% homologous to an amino acid sequence encoded by a nucleic acid of a polynucleotide of the invention and is capable of participation in the metabolism of compounds necessary for the production of seed storage compounds Brassica napus, Vernonia, Linum usitatissimum, Helianthus annuus, Zea mays, or Glycine max, or cellular membranes, or has one or more activities set forth in herein above. Preferably, the protein encoded by the nucleic acid molecule is at least about 50-60% homologous to one of the sequences encoded by a nucleic acid of a polynucleotide of the invention, more preferably at least about 60-70% homologous to one of the sequences encoded by such a nucleic acid, even more preferably at least about 70-80%, 80-90%, 90-95% homologous to one of the said sequences, and most preferably at least about 96%, 97%, 98%, or 99% homologous to one of the sequences encoded by a nucleic acid of a polynucleotide of the invention.

[0177] To determine the percent homology of two amino acid sequences (e.g., one of the sequences encoded by a nucleic acid of the invention and a mutant form thereof) or of two nucleic acids, the sequences are aligned for optimal comparison purposes (e.g., gaps can be introduced in the sequence of one protein or nucleic acid for optimal alignment with the other protein or nucleic acid). The amino acid residues or nucleotides at corresponding amino acid positions or nucleotide positions are then compared. When a position in one sequence is occupied by the same amino acid residue or nucleotide as the corresponding position in the other sequence, then the molecules are homologous at that position (i.e., as used herein amino acid or nucleic acid “homology” is equivalent to amino acid or nucleic acid “identity”). The percent homology between the two sequences is a function of the number of identical positions shared by the sequences (i.e., % homology=numbers of identical positions/total numbers of positions×100).

[0178] An isolated nucleic acid molecule encoding a LMP homologous to a protein sequence encoded by a nucleic acid of a polynucleotide of the invention can be created by introducing one or more nucleotide substitutions, additions or deletions into the said nucleotide sequence such that one or more amino acid substitutions, additions or deletions are introduced into the encoded protein. Mutations can be introduced into one of the sequences by standard techniques, such as site-directed mutagenesis and PCR-mediated mutagenesis. Preferably, conservative amino acid substitutions are made at one or more predicted non-essential amino acid residues. A “conservative amino acid substitution” is one in which the amino acid residue is replaced with an amino acid residue having a similar side chain. Families of amino acid residues having similar side chains have been defined in the art. These families include amino acids with basic side chains (e.g., lysine, arginine, histidine), acidic side chains (e.g., aspartic acid, glutamic acid), uncharged polar side chains (e.g., glycine, asparagine, glutamine, serine, threonine, tyrosine, cysteine), nonpolar side chains (e.g., alanine, valine, leucine, isoleucine, proline, phenylalanine, methionine, tryptophan), beta-branched side chains (e.g., threonine, valine, isoleucine) and aromatic side chains (e.g., tyrosine, phenylalanine, tryptophan, histidine). Thus, a predicted non-essential amino acid residue in a LMP is preferably replaced with another amino acid residue from the same side chain family. Alternatively, in another embodiment, mutations can be introduced randomly along all or part of a LMP coding sequence, such as by saturation mutagenesis, and the resultant mutants can be screened for a LMP activity described herein to identify mutants that retain LMP activity. Following mutagenesis of one of the said sequences, the encoded protein can be expressed recombinantly and the activity of the protein can be determined using, for example, assays described herein (see Exemplification).

[0179] LMPs are preferably produced by recombinant DNA techniques. For example, a nucleic acid molecule encoding the protein is cloned into an expression vector (as described above), the expression vector is introduced into a host cell (as described herein) and the LMP is expressed in the host cell. The LMP can then be isolated from the cells by an appropriate purification scheme using standard protein purification techniques. Alternative to recombinant expression, a LMP or peptide thereof can be synthesized chemically using standard peptide synthesis techniques. Moreover, native LMP can be isolated from cells, for example using an anti-LMP antibody, which can be produced by standard techniques utilizing a LMP or fragment thereof of this invention.

[0180] The invention also provides LMP chimeric or fusion proteins. As used herein, a LMP “chimeric protein” or “fusion protein” comprises a LMP polypeptide operatively linked to a non-LMP polypeptide. An “LMP polypeptide” refers to a polypeptide having an amino acid sequence corresponding to a LMP, whereas a “non-LMP polypeptide” refers to a polypeptide having an amino acid sequence corresponding to a protein which is not substantially homologous to the LMP, e.g., a protein which is different from the LMP and which is derived from the same or a different organism. Within the fusion protein, the term “operatively linked” is intended to indicate that the LMP polypeptide and the non-LMP polypeptide are fused to each other so that both sequences fulfill the proposed function attributed to the sequence used. The non-LMP polypeptide can be fused to the N-terminus or C-terminus of the LMP polypeptide. For example, in one embodiment, the fusion protein is a GST-LMP (glutathione S-transferase) fusion protein in which the LMP sequences are fused to the C-terminus of the GST sequences. Such fusion proteins can facilitate the purification of recombinant LMPs. In another embodiment, the fusion protein is a LMP containing a heterologous signal sequence at its N-terminus. In certain host cells (e.g., mammalian host cells), expression and/or secretion of a LMP can be increased through use of a heterologous signal sequence.

[0181] Preferably, a LMP chimeric or fusion protein of the invention is produced by standard recombinant DNA techniques. For example, DNA fragments coding for the different polypeptide sequences are ligated together in-frame in accordance with conventional techniques, for example by employing blunt-ended or stagger-ended termini for ligation, restriction enzyme digestion to provide for appropriate termini, filling-in of cohesive ends as appropriate, alkaline phosphatase treatment to avoid undesirable joining, and enzymatic ligation. In another embodiment, the fusion gene can be synthesized by conventional techniques including automated DNA synthesizers. Alternatively, PCR amplification of gene fragments can be carried out using anchor primers that give rise to complementary overhangs between two consecutive gene fragments, which can subsequently be annealed and reamplified to generate a chimeric gene sequence (see, for example, Current Protocols in Molecular Biology, eds. Ausubel et al., John Wiley & Sons: 1992). Moreover, many expression vectors are commercially available that already encode a fusion moiety (e.g., a GST polypeptide). An LMP-encoding nucleic acid can be cloned into such an expression vector such that the fusion moiety is linked in-frame to the LMP.

[0182] In addition to the nucleic acid molecules encoding LMPs described above, another aspect of the invention pertains to isolated nucleic acid molecules that are antisense thereto. An “antisense” nucleic acid comprises a nucleotide sequence that is complementary to a “sense” nucleic acid encoding a protein, e.g., complementary to the coding strand of a double-stranded cDNA molecule or complementary to an mRNA sequence. Accordingly, an antisense nucleic acid can hydrogen bond to a sense nucleic acid. The antisense nucleic acid can be complementary to an entire LMP coding strand, or to only a portion thereof. In one embodiment, an antisense nucleic acid molecule is antisense to a “coding region” of the coding strand of a nucleotide sequence encoding a LMP. The term “coding region” refers to the region of the nucleotide sequence comprising codons that are translated into amino acid residues. In another embodiment, the antisense nucleic acid molecule is antisense to a “noncoding region” of the coding strand of a nucleotide sequence encoding LMP. The term “noncoding region” refers to 5′ and 3′ sequences that flank the coding region that are not translated into amino acids (i.e., also referred to as 5′ and 3′ untranslated regions).

[0183] Given the coding strand sequences encoding LMP disclosed herein (e.g., the specific sequences set forth herein above), antisense nucleic acids of the invention can be designed according to the rules of Watson and Crick base pairing. The antisense nucleic acid molecule can be complementary to the entire coding region of LMP mRNA, but more preferably is an oligonucleotide that is antisense to only a portion of the coding or noncoding region of LMP mRNA. For example, the antisense oligonucleotide can be complementary to the region surrounding the translation start site of LMP mRNA. An antisense oligonucleotide can be, for example, about 5, 10, 15, 20, 25, 30, 35, 40, 45, or 50 nucleotides in length. An antisense or sense nucleic acid of the invention can be constructed using chemical synthesis and enzymatic ligation reactions using procedures known in the art. For example, an antisense nucleic acid (e.g., an antisense oligonucleotide) can be chemically synthesized using naturally occurring nucleotides or variously modified nucleotides designed to increase the biological stability of the molecules or to increase the physical stability of the duplex formed between the antisense and sense nucleic acids, e.g., phosphorothioate derivatives and acridine substituted nucleotides can be used. Examples of modified nucleotides which can be used to generate the antisense nucleic acid include 5-fluorouracil, 5-bromouracil, 5-chlorouracil, 5-iodouracil, hypoxanthine, xanthine, 4-acetylcytosine, 5-(carboxyhydroxylmethyl)uracil, 5-carboxymethylamino-methyl-2-thiouridine, 5-carboxymethylaminomethyluracil, dihydrouracil, beta-D-galactosylqueosine, inosine, N-6-isopentenyladenine, 1-methyl-guanine, 1-methylinosine, 2,2-dimethylguanine, 2-methyladenine, 2-methylguanine, 3-methylcytosine, 5-methyl-cytosine, N-6-adenine, 7-methylguanine, 5-methyl-aminomethyluracil, 5-methoxyamino-methyl-2-thiouracil, beta-D-mannosylqueosine, 5′-methoxycarboxymethyluracil, 5-methoxyuracil, 2-methylthio-N-6-isopentenyladenine, uracil-5-oxyacetic acid (v), wybutoxosine, pseudouracil, queosine, 2-thiocytosine, 5-methyl-2-thiouracil, 2-thiouracil, 4-thiouracil, 5-methyluracil, uracil-5-oxyacetic acid methylester, uracil-5-oxyacetic acid (v), 5-methyl-2-thiouracil, 3-(3-amino-3-N-2-carboxypropyl)uracil, (acp3)w, and 2,6-diamino-purine. Alternatively, the antisense nucleic acid can be produced biologically using an expression vector into which a nucleic acid has been subcloned in an antisense orientation (i.e., RNA transcribed from the inserted nucleic acid will be of an antisense orientation to a target nucleic acid of interest, described further in the following subsection).

[0184] In another variation of the antisense technology, a double-strand interfering RNA construct can be used to cause a down-regulation of the LMP mRNA level and LMP activity in transgenic plants. This requires transforming the plants with a chimeric construct containing a portion of the LMP sequence in the sense orientation fused to the antisense sequence of the same portion of the LMP sequence. A DNA linker region of variable length can be used to separate the sense and antisense fragments of LMP sequences in the construct.

[0185] The antisense nucleic acid molecules of the invention are typically administered to a cell or generated in situ such that they hybridize with or bind to cellular mRNA and/or genomic DNA encoding a LMP to thereby inhibit expression of the protein, e.g., by inhibiting transcription and/or translation. The hybridization can be by conventional nucleotide complementarity to form a stable duplex, or, for example, in the case of an antisense nucleic acid molecule which binds to DNA duplexes, through specific interactions in the major groove of the double helix. The antisense molecule can be modified such that it specifically binds to a receptor or an antigen expressed on a selected cell surface, e.g., by linking the antisense nucleic acid molecule to a peptide or an antibody which binds to a cell surface receptor or antigen. The antisense nucleic acid molecule can also be delivered to cells using the vectors described herein. To achieve sufficient intracellular concentrations of the antisense molecules, vector constructs in which the antisense nucleic acid molecule is placed under the control of a strong prokaryotic, viral, or eukaryotic including plant promoters are preferred.

[0186] In yet another embodiment, the antisense nucleic acid molecule of the invention is an—anomeric nucleic acid molecule. An anomeric nucleic acid molecule forms specific double-stranded hybrids with complementary RNA in which, contrary to the usual units, the strands run parallel to each other (Gaultier et al. 1987, Nucleic Acids Res. 15:6625-6641). The antisense nucleic acid molecule can also comprise a 2′-o-methyl-ribonucleotide (Inoue et al. 1987, Nucleic Acids Res. 15:6131-6148) or a chimeric RNA-DNA analogue (Inoue et al. 1987, FEBS Lett. 215:327-330).

[0187] In still another embodiment, an antisense nucleic acid of the invention is a ribozyme. Ribozymes are catalytic RNA molecules with ribonuclease activity, which are capable of cleaving a single-stranded nucleic acid, such as an mRNA, to which they have a complementary region. Thus, ribozymes (e.g., hammerhead ribozymes (described in Haselhoff & Gerlach 1988, Nature 334:585-591)) can be used to catalytically cleave LMP mRNA transcripts to thereby inhibit translation of LMP mRNA. A ribozyme having specificity for a LMP-encoding nucleic acid can be designed based upon the nucleotide sequence of a LMP cDNA disclosed herein or on the basis of a heterologous sequence to be isolated according to methods taught in this invention. For example, a derivative of a Tetrahymena L-19 IVS RNA can be constructed in which the nucleotide sequence of the active site is complementary to the nucleotide sequence to be cleaved in a LMP-encoding mRNA (see, e.g., Cech et al., U.S. Pat. No. 4,987,071 and Cech et al., U.S. Pat. No. 5,116,742). Alternatively, LMP mRNA can be used to select a catalytic RNA having a specific ribonuclease activity from a pool of RNA molecules (see, e.g., Bartel, D. & Szostak J. W. 1993, Science 261:1411-1418).

[0188] Alternatively, LMP gene expression can be inhibited by targeting nucleotide sequences complementary to the regulatory region of a LMP nucleotide sequence (e.g., a LMP promoter and/or enhancers) to form triple helical structures that prevent transcription of a LMP gene in target cells (See generally, Helene C. 1991, Anticancer Drug Des. 6:569-84; Helene C. et al. 1992, Ann. N.Y. Acad. Sci. 660:27-36; and Maher, L. J. 1992, Bioassays 14:807-15).

[0189] Another aspect of the invention pertains to vectors, preferably expression vectors, containing a nucleic acid encoding a LMP (or a portion thereof). As used herein, the term “vector” refers to a nucleic acid molecule capable of transporting another nucleic acid to which it has been linked. One type of vector is a “plasmid,” which refers to a circular double stranded DNA loop into which additional DNA segments can be ligated. Another type of vector is a viral vector, wherein additional DNA segments can be ligated into the viral genome. Certain vectors are capable of autonomous replication in a host cell into which they are introduced (e.g., bacterial vectors having a bacterial origin of replication and episomal mammalian vectors). Other vectors (e.g., non-episomal mammalian vectors) are integrated into the genome of a host cell upon introduction into the host cell, and thereby are replicated along with the host genome. Moreover, certain vectors are capable of directing the expression of genes to which they are operatively linked. Such vectors are referred to herein as “expression vectors.” In general, expression vectors of utility in recombinant DNA techniques are often in the form of plasmids. In the present specification, “plasmid” and “vector” can be used inter-changeably as the plasmid is the most commonly used form of vector. However, the invention is intended to include such other forms of expression vectors, such as viral vectors (e.g., replication defective retroviruses, adenoviruses and adeno-associated viruses), which serve equivalent functions.

[0190] The recombinant expression vectors of the invention comprise a nucleic acid of the invention in a form suitable for expression of the nucleic acid in a host cell, which means that the recombinant expression vectors include one or more regulatory sequences, selected on the basis of the host cells to be used for expression, which is operatively linked to the nucleic acid sequence to be expressed. Within a recombinant expression vector, “operably linked” is intended to mean that the nucleotide sequence of interest is linked to the regulatory sequence(s) in a manner which allows for expression of the nucleotide sequence and both sequences are fused to each other so that each fulfills its proposed function (e.g., in an in vitro transcription/translation system or in a host cell when the vector is introduced into the host cell). The term “regulatory sequence” is intended to include promoters, enhancers, and other expression control elements (e.g., polyadenylation signals). Such regulatory sequences are described, for example, in Goeddel; Gene Expression Technology: Methods in Enzymology 185, Academic Press, San Diego, Calif. (1990) or see: Gruber and Crosby, in: Methods in Plant Molecular Biology and Biotechnolgy, CRC Press, Boca Raton, Fla., eds.: Glick & Thompson, Chapter 7, 89-108 including the references therein. Regulatory sequences include those that direct constitutive expression of a nucleotide sequence in many types of host cell and those that direct expression of the nucleotide sequence only in certain host cells or under certain conditions. It will be appreciated by those skilled in the art that the design of the expression vector can depend on such factors as the choice of the host cell to be transformed, the level of expression of protein desired, etc. The expression vectors of the invention can be introduced into host cells to thereby produce proteins or peptides, including fusion proteins or peptides, encoded by nucleic acids as described herein (e.g., LMPs, mutant forms of LMPs, fusion proteins, etc.).

[0191] The recombinant expression vectors of the invention can be designed for expression of

[0192] LMPs in prokaryotic or eukaryotic cells. For example, LMP genes can be expressed in bacterial cells, insect cells (using baculovirus expression vectors), yeast and other fungal cells (see Romanos M. A. et al. 1992, Foreign gene expression in yeast: a review, Yeast 8:423-488; van den Hondel, C. A. M. J. J. et al. 1991, Heterologous gene expression in filamentous fungi, in: More Gene Manipulations in Fungi, Bennet & Lasure, eds., p. 396-428:Academic Press: an Diego; and van den Hondel & Punt 1991, Gene transfer systems and vector development for filamentous fungi, in: Applied Molecular Genetics of Fungi, Peberdy et al., eds., p. 1-28, Cambridge University Press: Cambridge), algae (Falciatore et al. 1999, Marine Biotechnology 1:239-251), ciliates of the types: Holotrichia, Peritrichia, Spirotrichia, Suctoria, Tetrahymena, Paramecium, Colpidium, Glaucoma, Platyophrya, Potomacus, Pseudocohnilembus, Euplotes, Engelmaniella, and Stylonychia, especially of the genus Stylonychia lemnae with vectors following a transformation method as described in WO 98/01572 and multicellular plant cells (see Schmidt & Willmitzer 1988, High efficiency Agrobacterium tumefaciens-mediated transformation of Arabidopsis thaliana leaf and cotyledon plants, Plant Cell Rep.:583-586); Plant Molecular Biology and Biotechnology, C Press, Boca Raton, Fla., chapter 6/7, S.71-119 (1993); White, Jenes et al., Techniques for Gene Transfer, in: Transgenic Plants, Vol. 1, Engineering and Utilization, eds.: Kung and Wu, Academic Press 1993, 128-43; Potrykus 1991, Annu. Rev. Plant Physiol. Plant Mol. Biol. 42:205-225 (and references cited therein) or mammalian cells. Suitable host cells are discussed further in Goeddel, Gene Expression Technology: Methods in Enzymology 185, Academic Press, San Diego, Calif. 1990). Alternatively, the recombinant expression vector can be transcribed and translated in vitro, for example using T7 promoter regulatory sequences and T7 polymerase.

[0193] Expression of proteins in prokaryotes is most often carried out with vectors containing constitutive or inducible promoters directing the expression of either fusion or non-fusion proteins. Fusion vectors add a number of amino acids to a protein encoded therein, usually to the amino terminus of the recombinant protein but also to the C-terminus or fused within suitable regions in the proteins. Such fusion vectors typically serve one or more of the following purposes: 1) to increase expression of recombinant protein; 2) to increase the solubility of the recombinant protein; and 3) to aid in the purification of the recombinant protein by acting as a ligand in affinity purification. Often, in fusion expression vectors, a proteolytic cleavage site is introduced at the junction of the fusion moiety and the recombinant protein to enable separation of the recombinant protein from the fusion moiety subsequent to purification of the fusion protein. Such enzymes, and their cognate recognition sequences, include Factor Xa, thrombin, and enterokinase.

[0194] Typical fusion expression vectors include pGEX (Pharmacia Biotech Inc; Smith & Johnson 1988, Gene 67:31-40), pMAL (New England Biolabs, Beverly, Mass.) and pRIT5 (Pharmacia, Piscataway, N.J.) which fuse glutathione S-transferase (GST), maltose E binding protein, or protein A, respectively, to the target recombinant protein. In one embodiment, the coding sequence of the LMP is cloned into a pGEX expression vector to create a vector encoding a fusion protein comprising, from the N-terminus to the C-terminus, GST-thrombin cleavage site-X protein. The fusion protein can be purified by affinity chromatography using glutathione-agarose resin. Recombinant LMP unfused to GST can be recovered by cleavage of the fusion protein with thrombin.

[0195] Examples of suitable inducible non-fusion E. coli expression vectors include pTrc (Amann et al. 1988, Gene 69:301-315) and pET 11d (Studier et al. 1990, Gene Expression Technology: Methods in Enzymology 185, Academic Press, San Diego, Calif. 60-89). Target gene expression from the pTrc vector relies on host RNA polymerase transcription from a hybrid trp-lac fusion promoter. Target gene expression from the pET 11d vector relies on transcription from a T7 gn10-lac fusion promoter mediated by a coexpressed viral RNA polymerase (T7 gn1). This viral polymerase is supplied by host strains BL21 (DE3) or HMS174 (DE3) from a resident prophage harboring a T7 gn1 gene under the transcriptional control of the lacUV 5 promoter.

[0196] One strategy to maximize recombinant protein expression is to express the protein in a host bacteria with an impaired capacity to proteolytically cleave the recombinant protein (Gottesman S. 1990, Gene Expression Technology: Methods in Enzymology 185:119-128, Academic Press, San Diego, Calif.). Another strategy is to alter the nucleic acid sequence of the nucleic acid to be inserted into an expression vector so that the individual codons for each amino acid are those preferentially utilized in the bacterium chosen for expression (Wada et al. 1992, Nucleic Acids Res. 20:2111-2118). Such alteration of nucleic acid sequences of the invention can be carried out by standard DNA synthesis techniques.

[0197] In another embodiment, the LMP expression vector is a yeast expression vector. Examples of vectors for expression in yeast S. cerevisiae include pYepSec1 (Baldari et al. 1987, Embo J. 6:229-234), pMFa (Kurjan & Herskowitz 1982, Cell 30:933-943), pJRY88 (Schultz et al. 1987, Gene 54:113-123), and pYES2 (Invitrogen Corporation, San Diego, Calif.). Vectors and methods for the construction of vectors appropriate for use in other fungi, such as the filamentous fungi, include those detailed in: van den Hondel & Punt 1991, “Gene transfer systems and vector development for filamentous fungi,” in: Applied Molecular Genetics of Fungi, Peberdy et al., eds, p. 1-28, Cambridge University Press: Cambridge.

[0198] Alternatively, the LMPs of the invention can be expressed in insect cells using baculovirus expression vectors. Baculovirus vectors available for expression of proteins in cultured insect cells (e.g., Sf 9 cells) include the pAc series (Smith et al. 1983, Mol. Cell Biol. 3:2156-2165) and the pVL series (Lucklow & Summers 1989, Virology 170:31-39).

[0199] In yet another embodiment, a nucleic acid of the invention is expressed in mammalian cells using a mammalian expression vector. Examples of mammalian expression vectors include pCDM8 (Seed 1987, Nature 329:840) and pMT2PC (Kaufman et al. 1987, EMBO J. 6:187-195). When used in mammalian cells, the expression vector's control functions are often provided by viral regulatory elements. For example, commonly used promoters are derived from polyoma, Adenovirus 2, cytomegalovirus, and Simian Virus 40. For other suitable expression systems for both prokaryotic and eukaryotic cells see chapters 16 and 17 of Sambrook, Fritsh and Maniatis, Molecular Cloning: A Laboratory Manual. 2nd, ed., Cold Spring Harbor Laboratory, Cold Spring Harbor Laboratory Press, Cold Spring Harbor, N.Y., 1989.

[0200] In another embodiment, the LMPs of the invention may be expressed in uni-cellular plant cells (such as algae, see Falciatore et al. (1999, Marine Biotechnology 1:239-251 and references therein) and plant cells from higher plants (e.g., the spermatophytes, such as crop plants). Examples of plant expression vectors include those detailed in: Becker, Kemper, Schell and Masterson (1992, “New plant binary vectors with selectable markers located proximal to the left border,” Plant Mol. Biol. 20:1195-1197) and Bevan (1984, “Binary Agrobacterium vectors for plant transformation, Nucleic Acids Res. 12:8711-8721; “Vectors for Gene Transfer in Higher Plants”; in: Transgenic Plants, Vol. 1, Engineering and Utilization, eds.: Kung and R. Wu, Academic Press, 1993, S. 15-38).

[0201] A plant expression cassette preferably contains regulatory sequences capable to drive gene expression in plant cells and which are operably linked so that each sequence can fulfil its function such as termination of transcription, including polyadenylation signals. Preferred polyadenylation signals are those originating from Agrobacterium tumefaciens t-DNA such as the gene 3 known as octopine synthase of the Ti-plasmid pTiACH5 (Gielen et al. 1984, EMBO J. 3:835) or functional equivalents thereof but also all other terminators functionally active in plants are suitable.

[0202] As plant gene expression is very often not limited on transcriptional levels a plant expression cassette preferably contains other operably linked sequences like translational enhancers such as the overdrive-sequence containing the 5′-untranslated leader sequence from tobacco mosaic virus enhancing the protein per RNA ratio (Gallie et al. 1987, Nucleic Acids Res. 15:8693-8711).

[0203] Plant gene expression has to be operably linked to an appropriate promoter conferring gene expression in a timely, cell or tissue specific manner. Preferred are promoters driving constitutive expression (Benfey et al. 1989, EMBO J. 8:2195-2202) like those derived from plant viruses like the 35S CAMV (Franck et al. 1980, Cell 21:285-294), the 19S CaMV (see also U.S. Pat. No. 5,352,605 and WO 84/02913) or plant promoters like those from Rubisco small subunit described in U.S. Pat. No. 4,962,028. Even more preferred are seed-specific promoters driving expression of LMP proteins during all or selected stages of seed development. Seed-specific plant promoters are known to those of ordinary skill in the art and are identified and characterized using seed-specific mRNA libraries and expression profiling techniques. Seed-specific promoters include the napin-gene promoter from rapeseed (U.S. Pat. No. 5,608,152), the USP-promoter from Vicia faba (Baeumlein et al. 1991, Mol. Gen. Genetics 225:459-67), the oleosin-promoter from Arabidopsis (WO 98/45461), the phaseolin-promoter from Phaseolus vulgaris (U.S. Pat. No. 5,504,200), the Bce4-promoter from Brassica (WO9113980) or the legumin B4 promoter (LeB4; Baeumlein et al. 1992, Plant J. 2:233-239) as well as promoters conferring seed specific expression in monocot plants like maize, barley, wheat, rye, rice etc. Suitable promoters to note are the Ipt2 or Ipt1-gene promoter from barley (WO 95/15389 and WO 95/23230) or those described in WO 99/16890 (promoters from the barley hordein-gene, the rice glutelin gene, the rice oryzin gene, the rice prolamin gene, the wheat gliadin gene, wheat glutelin gene, the maize zein gene, the oat glutelin gene, the Sorghum kasirin-gene, and the rye secalin gene).

[0204] Plant gene expression can also be facilitated via an inducible promoter (for a review see Gatz 1997, Annu. Rev. Plant Physiol. Plant Mol. Biol. 48:89-108). Chemically inducible promoters are especially suitable if gene expression is desired in a time specific manner. Examples for such promoters are a salicylic acid inducible promoter (WO 95/19443), a tetracycline inducible promoter (Gatz et al. 1992, Plant J. 2:397-404) and an ethanol inducible promoter (WO 93/21334).

[0205] Promoters responding to biotic or abiotic stress conditions are also suitable promoters such as the pathogen inducible PRP1-gene promoter (Ward et al., 1993, Plant. Mol. Biol. 22:361-366), the heat inducible hsp80-promoter from tomato (U.S. Pat. No. 5,187,267), cold inducible alpha-amylase promoter from potato (WO 96/12814) or the wound-inducible pinII-promoter (EP 375091).

[0206] Other preferred sequences for use in plant gene expression cassettes are targeting-sequences necessary to direct the gene-product in its appropriate cell compartment (for review see Kermode 1996, Crit. Rev. Plant Sci. 15:285-423 and references cited therein) such as the vacuole, the nucleus, all types of plastids like amyloplasts, chloroplasts, chromoplasts, the extracellular space, mitochondria, the endoplasmic reticulum, oil bodies, peroxisomes and other compartments of plant cells. Also especially suited are promoters that confer plastid-specific gene expression, as plastids are the compartment where precursors and some end products of lipid biosynthesis are synthesized. Suitable promoters such as the viral RNA-polymerase promoter are described in WO 95/16783 and WO 97/06250 and the clpP-promoter from Arabidopsis described in WO 99/46394.

[0207] The invention further provides a recombinant expression vector comprising a DNA molecule of the invention cloned into the expression vector in an antisense orientation. That is, the DNA molecule is operatively linked to a regulatory sequence in a manner that allows for expression (by transcription of the DNA molecule) of an RNA molecule that is antisense to LMP mRNA. Regulatory sequences operatively linked to a nucleic acid cloned in the antisense orientation can be chosen which direct the continuous expression of the antisense RNA molecule in a variety of cell types, for instance viral promoters and/or enhancers, or regulatory sequences can be chosen which direct constitutive, tissue specific or cell type specific expression of antisense RNA. The antisense expression vector can be in the form of a recombinant plasmid, phagemid or attenuated virus in which antisense nucleic acids are produced under the control of a high efficiency regulatory region, the activity of which can be determined by the cell type into which the vector is introduced. For a discussion of the regulation of gene expression using antisense genes see Weintraub et al. (1986, Antisense RNA as a molecular tool for genetic analysis, Reviews-Trends in Genetics, Vol. 1) and Mol et al. (1990, FEBS Lett. 268:427-430).

[0208] Another aspect of the invention pertains to host cells into which a recombinant expression vector of the invention has been introduced. The terms “host cell” and “recombinant host cell” are used interchangeably herein. It is to be understood that such terms refer not only to the particular subject cell but also to the progeny or potential progeny of such a cell. Because certain modifications may occur in succeeding generations due to either mutation or environmental influences, such progeny may not, in fact, be identical to the parent cell, but are still included within the scope of the term as used herein. A host cell can be any prokaryotic or eukaryotic cell. For example, a LMP can be expressed in bacterial cells, insect cells, fungal cells, mammalian cells (such as Chinese hamster ovary cells (CHO) or COS cells), algae, ciliates, or plant cells. Other suitable host cells are known to those skilled in the art.

[0209] Vector DNA can be introduced into prokaryotic or eukaryotic cells via conventional transformation or transfection techniques. As used herein, the terms “transformation” and “transfection,” “conjugation,” and “transduction” are intended to refer to a variety of art-recognized techniques for introducing foreign nucleic acid (e.g., DNA) into a host cell, including calcium phosphate or calcium chloride co-precipitation, DEAE-dextran-mediated transfection, lipofection, natural competence, chemical-mediated transfer, or electroporation. Suitable methods for transforming or transfecting host cells including plant cells can be found in Sambrook et al. (1989, Molecular Cloning: A Laboratory Manual. 2nd, ed., Cold Spring Harbor Laboratory, Cold Spring Harbor Laboratory Press, Cold Spring Harbor, N.Y.) and other laboratory manuals such as Methods in Molecular Biology 1995, Vol. 44, Agrobacterium protocols, ed: Gartland and Davey, Humana Press, Totowa, N.J.

[0210] For stable transfection of mammalian and plant cells, it is known that, depending upon the expression vector and transfection technique used, only a small fraction of cells may integrate the foreign DNA into their genome. In order to identify and select these integrants, a gene that encodes a selectable marker (e.g., resistance to antibiotics) is generally introduced into the host cells along with the gene of interest. Preferred selectable markers include those that confer resistance to drugs, such as G418, hygromycin, kanamycin, and methotrexate or in plants that confer resistance towards an herbicide such as glyphosate or glufosinate. A nucleic acid encoding a selectable marker can be introduced into a host cell on the same vector as that encoding a LMP or can be introduced on a separate vector. Cells stably transfected with the introduced nucleic acid can be identified by, for example, drug selection (e.g., cells that have incorporated the selectable marker gene will survive, while the other cells die).

[0211] To create a homologous recombinant microorganism, a vector is prepared which contains at least a portion of a LMP gene into which a deletion, addition or substitution has been introduced to thereby alter, e.g., functionally disrupt, the LMP gene. Preferably, this LMP gene is an Brassica napus, Vernonia, Linum usitatissimum, Helianthus annuus, Zea mays, or Glycine max LMP gene, but it can be a homologue from a related plant or even from a mammalian, yeast, or insect source. In a preferred embodiment, the vector is designed such that, upon homologous recombination, the endogenous LMP gene is functionally disrupted (i.e., no longer encodes a functional protein; also referred to as a knock-out vector). Alternatively, the vector can be designed such that, upon homologous recombination, the endogenous LMP gene is mutated or otherwise altered but still encodes functional protein (e.g., the upstream regulatory region can be altered to thereby alter the expression of the endogenous LMP). To create a point mutation via homologous recombination, DNA-RNA hybrids can be used in a technique known as chimeraplasty (Cole-Strauss et al. 1999, Nucleic Acids Res. 27:1323-1330 and Kmiec 1999, American Scientist 87:240-247). Homologous recombination procedures in Arabidopsis thaliana or other crops are also well known in the art and are contemplated for use herein.

[0212] In a homologous recombination vector, the altered portion of the LMP gene is flanked at its 5′ and 3′ ends by additional nucleic acid of the LMP gene to allow for homologous recombination to occur between the exogenous LMP gene carried by the vector and an endogenous LMP gene in a microorganism or plant. The additional flanking LMP nucleic acid is of sufficient length for successful homologous recombination with the endogenous gene. Typically, several hundreds of base pairs up to kilobases of flanking DNA (both at the 5′ and 3′ ends) are included in the vector (see e.g., Thomas & Capecchi 1987, Cell 51:503, for a description of homologous recombination vectors). The vector is introduced into a microorganism or plant cell (e.g., via polyethyleneglycol mediated DNA). Cells in which the introduced LMP gene has homologously recombined with the endogenous LMP gene are selected using art-known techniques.

[0213] In another embodiment, recombinant microorganisms can be produced which contain selected systems, which allow for regulated expression of the introduced gene. For example, inclusion of a LMP gene on a vector placing it under control of the lac operon permits expression of the LMP gene only in the presence of IPTG. Such regulatory systems are well known in the art.

[0214] A host cell of the invention, such as a prokaryotic or eukaryotic host cell in culture can be used to produce (i.e., express) a LMP. Accordingly, the invention further provides methods for producing LMPs using the host cells of the invention. In one embodiment, the method comprises culturing a host cell of the invention (into which a recombinant expression vector encoding a LMP has been introduced, or which contains a wild-type or altered LMP gene in it's genome) in a suitable medium until LMP is produced. In another embodiment, the method further comprises isolating LMPs from the medium or the host cell.

[0215] Another aspect of the invention pertains to isolated LMPs, and biologically active portions thereof. An “isolated” or “purified” protein or biologically active portion thereof is substantially free of cellular material when produced by recombinant DNA techniques, or chemical precursors or other chemicals when chemically synthesized. The language “substantially free of cellular material” includes preparations of LMP in which the protein is separated from cellular components of the cells in which it is naturally or recombinantly produced. In one embodiment, the language “substantially free of cellular material” includes preparations of LMP having less than about 30% (by dry weight) of non-LMP (also referred to herein as a “contaminating protein”), more preferably less than about 20% of non-LMP, still more preferably less than about 10% of non-LMP, and most preferably less than about 5% non-LMP. When the LMP or biologically active portion thereof is recombinantly produced, it is also preferably substantially free of culture medium, i.e., culture medium represents less than about 20%, more preferably less than about 10%, and most preferably less than about 5% of the volume of the protein preparation. The language “substantially free of chemical precursors or other chemicals” includes preparations of LMP in which the protein is separated from chemical precursors or other chemicals that are involved in the synthesis of the protein. In one embodiment, the language “substantially free of chemical precursors or other chemicals” includes preparations of LMP having less than about 30% (by dry weight) of chemical precursors or non-LMP chemicals, more preferably less than about 20% chemical precursors or non-LMP chemicals, still more preferably less than about 10% chemical precursors or non-LMP chemicals, and most preferably less than about 5% chemical precursors or non-LMP chemicals. In preferred embodiments, isolated proteins or biologically active portions thereof lack contaminating proteins from the same organism from which the LMP is derived. Typically, such proteins are produced by recombinant expression of, for example, a Brassica napus, Vemonia, Linum usitatissimum, Helianthus annuus, Zea mays, or Glycine max LMP in other plants than Brassica napus, Vemonia, Linum usitatissimum, Helianthus annuus, Zea mays, or Glycine max, algae or fungi.

[0216] An isolated LMP or a portion thereof of the invention can participate in the metabolism of compounds necessary for the production of seed storage compounds in Brassica napus, Vernonia, Linum usitatissimum, Helianthus annuus, Zea mays, or Glycine max or of cellular membranes, or has one or more of the activities set forth herein above. In preferred embodiments, the protein or portion thereof comprises an amino acid sequence which is sufficiently homologous to an amino acid sequence encoded by a nucleic acid of a polynucleotide of the invention such that the protein or portion thereof maintains the ability to participate in the metabolism of compounds necessary for the construction of cellular membranes in Brassica napus, Vernonia, Linum usitatissimum, Helianthus annuus, Zea mays, or Glycine max, or in the transport of molecules across these membranes. The portion of the protein is preferably a biologically active portion as described herein. In another preferred embodiment, a LMP of the invention has an amino acid sequence encoded by a nucleic acid of a polynucleotide of the invention. In yet another preferred embodiment, the LMP has an amino acid sequence which is encoded by a nucleotide sequence which hybridizes, e.g., hybridizes under stringent conditions, to such a nucleotide sequence. In still another preferred embodiment, the LMP has an amino acid sequence which is encoded by a nucleotide sequence that is at least about 50-60%, preferably at least about 60-70%, more preferably at least about 70-80%, 80-90%, 90-95%, and even more preferably at least about 96%, 97%, 98%, 99% or more homologous to one of the amino acid sequences encoded by a nucleic acid of a polynucleotide of the invention. The preferred LMPs of the present invention also preferably possess at least one of the LMP activities described herein. For example, a preferred LMP of the present invention includes an amino acid sequence encoded by a nucleotide sequence which hybridizes, e.g., hybridizes under stringent conditions, to an aforementioned nucleotide sequence, and which can participate in the metabolism of compounds necessary for the construction of cellular membranes in Brassica napus, Vernonia, Linum usitatissimum, Helianthus annuus, Zea mays, or Glycine max, or in the transport of molecules across these membranes, or which has one or more of the activities set forth in herein above.

[0217] In other embodiments, the LMP is substantially homologous to an amino acid sequence encoded by a nucleic acid of a polynucleotide of the invention and retains the functional activity of the protein of one of the sequences encoded by such a nucleic acid yet differs in amino acid sequence due to natural variation or mutagenesis, as described in detail above. Accordingly, in another embodiment, the LMP is a protein which comprises an amino acid sequence which is at least about 50-60%, preferably at least about 60-70%, and more preferably at least about 70-80, 80-90, 90-95%, and most preferably at least about 96%, 97%, 98%, 99% or more homologous to an entire amino acid sequence and which has at least one of the LMP activities described herein. In another embodiment, the invention pertains to a full Brassica napus, Vernonia, Linum usitatissimum, Helianthus annuus, Zea mays, or Glycine max protein, which is substantially homologous to the entire amino acid sequence.

[0218] Dominant negative mutations or trans-dominant suppression can be used to reduce the activity of a LMP in transgenics seeds in order to change the levels of seed storage compounds. To achieve this, a mutation that abolishes the activity of the LMP is created and the inactive non-functional LMP gene is overexpressed in the transgenic plant. The inactive trans-dominant LMP protein competes with the active endogenous LMP protein for substrate or interactions with other proteins and dilutes out the activity of the active LMP. In this way the biological activity of the LMP is reduced without actually modifying the expression of the endogenous LMP gene. This strategy was used by Pontier et al to modulate the activity of plant transcription factors (Pontier D, Miao Z H, Lam E, Plant J 2001 Sep. 27(6): 529-38, Trans-dominant suppression of plant TGA factors reveals their negative and positive roles in plant defense responses).

[0219] Homologues of the LMP can be generated by mutagenesis, e.g., discrete point mutation or truncation of the LMP. As used herein, the term “homologue” refers to a variant form of the LMP that acts as an agonist or antagonist of the activity of the LMP. An agonist of the LMP can retain substantially the same, or a subset, of the biological activities of the LMP. An antagonist of the LMP can inhibit one or more of the activities of the naturally occurring form of the LMP, by, for example, competitively binding to a downstream or upstream member of the cell membrane component metabolic cascade which includes the LMP, or by binding to a LMP which mediates transport of compounds across such membranes, thereby preventing translocation from taking place.

[0220] In an alternative embodiment, homologues of the LMP can be identified by screening combinatorial libraries of mutants, e.g., truncation mutants, of the LMP for LMP agonist or antagonist activity. In one embodiment, a variegated library of LMP variants is generated by combinatorial mutagenesis at the nucleic acid level and is encoded by a variegated gene library. A variegated library of LMP variants can be produced by, for example, enzymatically ligating a mixture of synthetic oligonucleotides into gene sequences such that a degenerate set of potential LMP sequences is expressible as individual polypeptides, or alternatively, as a set of larger fusion proteins (e.g., for phage display) containing the set of LMP sequences therein. There are a variety of methods that can be used to produce libraries of potential LMP homologues from a degenerate oligonucleotide sequence. Chemical synthesis of a degenerate gene sequence can be performed in an automatic DNA synthesizer, and the synthetic gene then ligated into an appropriate expression vector. Use of a degenerate set of genes allows for the provision, in one mixture, of all of the sequences encoding the desired set of potential LMP sequences. Methods for synthesizing degenerate oligonucleotides are known in the art (see, e.g., Narang 1983, Tetrahedron 39:3; Itakura et al. 1984, Annu. Rev. Biochem. 53:323; Itakura et al. 1984, Science 198:1056; Ike et al. 1983, Nucleic Acids Res. 11:477).

[0221] In addition, libraries of fragments of the LMP coding sequences can be used to generate a variegated population of LMP fragments for screening and subsequent selection of homologues of a LMP. In one embodiment, a library of coding sequence fragments can be generated by treating a double stranded PCR fragment of a LMP coding sequence with a nuclease under conditions wherein nicking occurs only about once per molecule, denaturing the double stranded DNA, renaturing the DNA to form double stranded DNA which can include sense/antisense pairs from different nicked products, removing single stranded portions from reformed duplexes by treatment with S1 nuclease, and ligating the resulting fragment library into an expression vector. By this method, an expression library can be derived which encodes N-terminal, C-terminal and internal fragments of various sizes of the LMP.

[0222] Several techniques are known in the art for screening gene products of combinatorial libraries made by point mutations or truncation, and for screening cDNA libraries for gene products having a selected property. Such techniques are adaptable for rapid screening of the gene libraries generated by the combinatorial mutagenesis of LMP homologues. The most widely used techniques, which are amenable to high through-put analysis, for screening large gene libraries typically include cloning the gene library into replicable expression vectors, transforming appropriate cells with the resulting library of vectors, and expressing the combinatorial genes under conditions in which detection of a desired activity facilitates isolation of the vector encoding the gene whose product was detected. Recursive ensemble mutagenesis (REM), a new technique that enhances the frequency of functional mutants in the libraries, can be used in combination with the screening assays to identify LMP homologues (Arkin & Yourvan 1992, Proc. Natl. Acad. Sci. USA 89:7811-7815; Delgrave et al. 1993, Protein Engineering 6:327-331).

[0223] In another embodiment, cell based assays can be exploited to analyze a variegated LMP library, using methods well known in the art.

[0224] The nucleic acid molecules, proteins, protein homologues, fusion proteins, primers, vectors, and host cells described herein can be used in one or more of the following methods: identification of Brassica napus, Vemonia, Linum usitatissimum, Helianthus annuus, Zea mays, or Glycine max and related organisms; mapping of genomes of organisms related to Brassica napus, Vemonia, Linum usitatissimum, Helianthus annuus, Zea mays, or Glycine max; identification and localization of Brassica napus, Vernonia, Linum usitatissimum, Helianthus annuus, Zea mays, or Glycine max sequences of interest; evolutionary studies; determination of LMP regions required for function; modulation of a LMP activity; modulation of the metabolism of one or more cell functions; modulation of the transmembrane transport of one or more compounds; and modulation of seed storage compound accumulation.

[0225] The plant Arabidopsis thaliana represents one member of higher (or seed) plants. It is related to other plants such as Brassica napus, Vernonia, Linum usitatissimum, Helianthus annuus, Zea mays, or Glycine max which require light to drive photosynthesis and growth. Plants like Brassica napus, Vernonia, Linum usitatissimum, Helianthus annuus, Zea mays, or Glycine max share a high degree of homology on the DNA sequence and polypeptide level, allowing the use of heterologous screening of DNA molecules with probes evolving from other plants or organisms, thus enabling the derivation of a consensus sequence suitable for heterologous screening or functional annotation and prediction of gene functions in third species. The ability to identify such functions can therefore have significant relevance, e.g., prediction of substrate specificity of enzymes. Further, these nucleic acid molecules may serve as reference points for the mapping of Arabidopsis genomes, or of genomes of related organisms.

[0226] The LMP nucleic acid molecules of the invention have a variety of uses. First, the nucleic acid and protein molecules of the invention may serve as markers for specific regions of the genome. This has utility not only in the mapping of the genome, but also for functional studies of Brassica napus, Vemonia, Linum usitatissimum, Helianthus annuus, Zea mays, or Glycine max proteins. For example, to identify the region of the genome to which a particular Brassica napus, Vernonia, Linum usitatissimum, Helianthus annuus, Zea mays, or Glycine max DNA-binding protein binds, the Brassica napus, Vernonia, Linum usitatissimum, Helianthus annuus, Zea mays, or Glycine max genome could be digested, and the fragments incubated with the DNA-binding protein. Those which bind the protein may be additionally probed with the nucleic acid molecules of the invention, preferably with readily detectable labels; binding of such a nucleic acid molecule to the genome fragment enables the localization of the fragment to the genome map of Brassica napus, Vernonia, Linum usitatissimum, Helianthus annuus, Zea mays, or Glycine max, and, when performed multiple times with different enzymes, facilitates a rapid determination of the nucleic acid sequence to which the protein binds. Further, the nucleic acid molecules of the invention may be sufficiently homologous to the sequences of related species such that these nucleic acid molecules may serve as markers for the construction of a genomic map in related plants.

[0227] The LMP nucleic acid molecules of the invention are also useful for evolutionary and protein structural studies. The metabolic and transport processes in which the molecules of the invention participate are utilized by a wide variety of prokaryotic and eukaryotic cells; by comparing the sequences of the nucleic acid molecules of the present invention to those encoding similar enzymes from other organisms, the evolutionary relatedness of the organisms can be assessed. Similarly, such a comparison permits an assessment of which regions of the sequence are conserved and which are not, which may aid in determining those regions of the protein which are essential for the functioning of the enzyme. This type of determination is of value for protein engineering studies and may give an indication of what the protein can tolerate in terms of mutagenesis without losing function.

[0228] Manipulation of the LMP nucleic acid molecules of the invention may result in the production of LMPs having functional differences from the wild-type LMPs. These proteins may be improved in efficiency or activity, may be present in greater numbers in the cell than is usual, or may be decreased in efficiency or activity.

[0229] There are a number of mechanisms by which the alteration of a LMP of the invention may directly affect the accumulation and/or composition of seed storage compounds. In the case of plants expressing LMPs, increased transport can lead to altered accumulation of compounds and/or solute partitioning within the plant tissue and organs which ultimately could be used to affect the accumulation of one or more seed storage compounds during seed development. An example is provided by Mitsukawa et al. (1997, Proc. Natl. Acad. Sci. USA 94:7098-7102), where overexpression of an Arabidopsis high-affinity phosphate transporter gene in tobacco cultured cells enhanced cell growth under phosphate-limited conditions. Phosphate availability also affects significantly the production of sugars and metabolic intermediates (Hurry et al. 2000, Plant J. 24:383-396) and the lipid composition in leaves and roots (Hartel et al. 2000, Proc. Natl. Acad. Sci. USA 97:10649-10654). Likewise, the activity of the plant ACCase has been demonstrated to be regulated by phosphorylation (Savage & Ohlrogge 1999, Plant J. 18:521-527) and alterations in the activity of the kinases and phosphatases (LMPs) that act on the ACCase could lead to increased or decreased levels of seed lipid accumulation. Moreover, the presence of lipid kinase activities in chloroplast envelope membranes suggests that signal transduction pathways and/or membrane protein regulation occur in envelopes (see, e.g., Müller et al. 2000, J. Biol. Chem. 275:19475-19481 and literature cited therein). The ABI1 and ABI2 genes encode two protein serine/threonine phosphatases 2C, which are regulators in abscisic acid signaling pathway, and thereby in early and late seed development (e.g. Merlot et al. 2001, Plant J. 25:295-303). For more examples see also the section ‘background of the invention’.

[0230] The present invention also provides antibodies that specifically bind to an LMP-polypeptide, or a portion thereof, as encoded by a nucleic acid disclosed herein or as described herein.

[0231] Antibodies can be made by many well-known methods (see, e.g. Harlow and Lane, “Antibodies; A Laboratory Manual,” Cold Spring Harbor Laboratory, Cold Spring Harbor, N.Y., 1988). Briefly, purified antigen can be injected into an animal in an amount and in intervals sufficient to elicit an immune response. Antibodies can either be purified directly, or spleen cells can be obtained from the animal. The cells can then fused with an immortal cell line and screened for antibody secretion. The antibodies can be used to screen nucleic acid clone libraries for cells secreting the antigen. Those positive clones can then be sequenced (see, for example, Kelly et al. 1992, Bio/Technology 10:163-167; Bebbington et al. 1992, Bio/Technology 10:169-175).

[0232] The phrase “selectively binds” with the polypeptide refers to a binding reaction, which is determinative of the presence of the protein in a heterogeneous population of proteins and other biologics. Thus, under designated immunoassay conditions, the specified antibodies bound to a particular protein do not bind in a significant amount to other proteins present in the sample. Selective binding to an antibody under such conditions may require an antibody that is selected for its specificity for a particular protein. A variety of immunoassay formats may be used to select antibodies that selectively bind with a particular protein. For example, solid-phase ELISA immuno-assays are routinely used to select antibodies selectively immunoreactive with a protein. See Harlow and Lane “Antibodies, A Laboratory Manual,” Cold Spring Harbor Publications, New York (1988), for a description of immunoassay formats and conditions that could be used to determine selective binding.

[0233] In some instances, it is desirable to prepare monoclonal antibodies from various hosts. A description of techniques for preparing such monoclonal antibodies may be found in Stites et al., editors, “Basic and Clinical Immunology,” (Lange Medical Publications, Los Altos, Calif., Fourth Edition) and references cited therein, and in Harlow and Lane (“Antibodies, A Laboratory Manual,” Cold Spring Harbor Publications, New York, 1988).

[0234] Throughout this application, various publications are referenced. The disclosures of all of these publications and those references cited within those publications in their entireties are hereby incorporated by reference into this application in order to more fully describe the state of the art to which this invention pertains.

[0235] Throughout this application, various publications are referenced. The disclosures of all of these publications and those references cited within those publications in their entireties are hereby incorporated by reference into this application in order to more fully describe the state of the art, to which this invention pertains.

[0236] It will be apparent to those skilled in the art that various modifications and variations can be made in the present invention without departing from the scope or spirit of the invention. Other embodiments of the invention will be apparent to those skilled in the art from consideration of the specification and practice of the invention disclosed herein.

### FIGURES

[0237] FIG. 1. Relative changes in the seed oil content of transgenic Brassica napus plants genetically engineered to seed-specifically down regulate the TAG lipase encoded by SEQ ID NO: 2, 4 and 11.

[0238] FIG. 2: Seed oil content frequency distribution analysis (SOCFDA) of events of transgenic Brassica napus plants genetically engineered to seed-specifically down regulate the TAG lipase encoded by SEQ ID NO: 2, 4 and 11 and of Brassica napus wild type plants.

### EXAMPLES

### Example 1

[0239] General Processes

### General Cloning Processes

[0240] Cloning processes such as, for example, restriction cleavages, agarose gel electrophoresis, purification of DNA fragments, transfer of nucleic acids to nitrocellulose and nylon membranes, linkage of DNA fragments, transformation of Escherichia coli and yeast cells, growth of bacteria and sequence analysis of recombinant DNA were carried out as described in Sambrook et al. (1989, Cold Spring Harbor Laboratory Press: ISBN 0-87969-309-6) or Kaiser, Michaelis and Mitchell (1994, “Methods in Yeast Genetics,” Cold Spring Harbor Laboratory Press: ISBN 0-87969-451-3).

[0241] Chemicals. The chemicals used were obtained, if not mentioned otherwise in the text, in p.a. quality from the companies Fluka (Neu-Ulm), Merck (Darmstadt), Roth (Karlsruhe), Serva (Heidelberg) and Sigma (Deisenhofen). Solutions were prepared using purified, pyrogen-free water, designated as H2O in the following text, from a Milli-Q water system water purification plant (Millipore, Eschborn). Restriction endonucleases, DNA-modifying enzymes and molecular biology kits were obtained from the companies AGS (Heidelberg), Amersham (Braunschweig), Biometra (Göttingen), Roche (Mannheim), Genomed (Bad Oeynnhausen), New England Biolabs (Schwalbach/Taunus), Novagen (Madison, Wis., USA), Perkin-Elmer (Weiterstadt), Pharmacia (Freiburg), Qiagen (Hilden) and Stratagene (Amsterdam, Netherlands). They were used, if not mentioned otherwise, according to the manufacturer's instructions.

[0242] Plant Material and Growth: For determining effects on seed storage compounds wild type and Arabidopsis seeds from plants expressing LMP or LMP repression constructs were preincubated for three days in the dark at 4° C. before placing them into an incubator (AR-75, Percival Scientific, Boone, Iowa) at a photon flux density of 60-80 μmol m⁻² s⁻¹ and a light period of 16 hours (22° C.), and a dark period of 8 hours (18° C.). All plants were started on half-strength MS medium (Murashige & Skoog, 1962, Physiol. Plant. 15, 473-497), pH 6.2, 2% sucrose and 1.2% agar. Seeds were sterilized for 20 minutes in 20% bleach 0.5% triton X100 and rinsed 6 times with excess sterile water.

[0243] Brassica napus. Brassica napus varieties AC Excel, Quantum and Cresor were used for this study to create cDNA libraries. Seed, seed pod, flower, leaf, stem and root tissues were collected from plants. However, this study focused on the use of seed and seed pod tissues for cDNA libraries. Plants were tagged to harvest seeds collected 60-75 days after planting from two time points: 1-15 days and 15-25 days after anthesis. Plants have been grown in Metromix (Scotts, Marysville, Ohio) at 71° F. under a 14 hr photoperiod. Six seed and seed pod tissues of interest in this study were collected to create the following cDNA libraries: Immature seeds, mature seeds, immature seed pods, mature seed pods, night-harvested seed pods and Cresor variety (high erucic acid) seeds. Tissue samples were collected within specified time points for each developing tissue and multiple samples within a time frame pooled together for eventual extraction of total RNA. Samples from immature seeds were taken between 1-25 days after anthesis (daa), mature seeds between 25-50 daa, immature seed pods between 1-15 daa, mature seed pods between 15-50 daa, night-harvested seed pods between 1-50 daa and Cresor seeds 5-25 daa.

[0244] Glycine max. Glycine max cv. Resnick was used for this study to create cDNA libraries. Seed, seed pod, flower, leaf, stem and root tissues were collected from plants. However, this study focused on the use of seed and seed pod tissues for cDNA libraries. Plants were tagged to harvest seeds at the set days after anthesis: 5-15, 15-25, 25-35, & 33-50.

[0245] Linum usitatissimum cv. 00-44427 and 00-44338 (from Svalöf-Weibul, Sweden)were used for this study to create cDNA libraries. Developing seed were collected from the plants grown in the greenhouse for the production of cDNA libraries. Plants were tagged to harvest seeds at the set days after pollination: 15, 25, 33.

[0246] Zea mays cv. B73, Mo17 and B73xMo17were used for this study to create cDNA libraries. Seed, seed pod, flower, leaf, stem and root tissues were collected from plants in the field and greenhouse. However, this study focused on the use of seed and seed pod tissues for cDNA libraries. Plants were tagged to harvest seeds at the set days after pollination: 1, 4, 9, 10, 16, 19, 21, 23, 30, 36

[0247] Helianthus annuus cv. Sigma was used for this study to create cDNA libraries.

[0248] Plants were grown in Metromix (Scotts, Marysville, Ohio) at 25 OC in the greenhouse with supplementary lighting under a 14/10 light/dark cycle. Developing seeds were carefully removed with tweezers from the sunflowers 6-8 days, 13-16 days and 24-26 days after flowering of the first flowers on the outermost rim of the sunflower.

### Example 2

### Total DNA Isolation from Plants

[0249] The details for the isolation of total DNA relate to the working up of 1g fresh weight of plant material.

[0250] CTAB buffer: 2% (w/v) N-cethyl-N,N,N-trimethylammonium bromide (CTAB); 100 mM Tris HCl pH 8.0; 1.4 M NaCl; 20 mM EDTA. N-Laurylsarcosine buffer: 10% (w/v) N-laurylsarcosine; 100 mM Tris HCl pH 8.0; 20 mM EDTA.

[0251] The plant material was triturated under liquid nitrogen in a mortar to give a fine powder and transferred to 2 ml Eppendorf vessels. The frozen plant material was then covered with a layer of 1 ml of decomposition buffer (1 ml CTAB buffer, 100 μl of N-laurylsarcosine buffer, 20 μl of β-mercaptoethanol and 10 μl of proteinase K solution, 10 mg/ml) and incubated at 60° C. for one hour with continuous shaking. The homogenate obtained was distributed into two Eppendorf vessels (2 ml) and extracted twice by shaking with the same volume of chloroform/isoamyl alcohol (24:1). For phase separation, centrifugation was carried out at 8000 g and RT for 15 min in each case. The DNA was then precipitated at −70° C. for 30 min using ice-cold isopropanol. The precipitated DNA was sedimented at 4° C. and 10,000 g for 30 min and resuspended in 180 μl of TE buffer (Sambrook et al. 1989, Cold Spring Harbor Laboratory Press: ISBN 0-87969-309-6). For further purification, the DNA was treated with NaCl (1.2 M final concentration) and precipitated again at −70° C. for 30 min using twice the volume of absolute ethanol. After a washing step with 70% ethanol, the DNA was dried and subsequently taken up in 50 μl of H₂O+RNAse (50mg/ml final concentration). The DNA was dissolved overnight at 4° C. and the RNAse digestion was subsequently carried out at 37° C. for 1 h. Storage of the DNA took place at 4° C.

### Example 3

### Isolation of Total RNA and poly-(A)+ RNA from Plants

[0252] Brassica napus, Linum usitatissimum, Zea mays and Glycine max seeds were separated from pods to create homogeneous materials for seed and seed pod cDNA libraries. Tissues were ground into fine powder under liquid N₂ using a mortar and pestle and transferred to a 50 ml tube. Tissue samples were stored at −80° C. until extractions could be performed.

[0253] Total RNA was extracted from tissues using RNeasy Maxi kit (Qiagen) according to manufacture's protocol and mRNA was processed from total RNA using Oligotex mRNA Purification System kit (Qiagen), also according to manufacture's protocol. mRNA was sent to Hyseq Pharmaceuticals Incorporated (Sunnyville, Calif.) for further processing of mRNA from each tissue type into cDNA libraries and for use in their proprietary processes in which similar inserts in plasmids are clustered based on hybridization patterns.

### Example 4

### cDNA Library Construction

[0254] Brassica napus, Glycine max, Helianthus annuus, Zea mays and Linum usitatissimum cDNA libraries were generated at Hyseq Pharmaceuticals Incorporated (Sunnyville, Calif.). No amplification steps were used in the library production to retain expression information. Hyseq's approach involves grouping the genes into clusters and then sequencing representative members from each cluster. cDNA libraries were generated from oligo dT column purified mRNA. Colonies from transformation of the cDNA library into E. coli were randomly picked and the cDNA insert were amplified by PCR and spotted on nylon membranes. A set of ³³⁻P radiolabeled oligonucleotides were hybridized to the clones and the resulting hybridization pattern determined to which cluster a particular clone belonged. cDNA clones and their DNA sequences were obtained for use in overexpression in transgenic plants and in other molecular biology processes described herein.

### Example 5

[0255] Identification of LMP genes of Interest that results in an increased oil content by either being up- or down-regulated. This example illustrates how cDNA clones encoding LMP polypeptides of Brassica napus, Linum usitatissimum, Helianthuus annuus, Vernonia sp., Zea mays and Glycine max were identified and isolated.

[0256] The Arabidopsis gene AT4g39850, coding for a putative peroxisomal ABC transporter was used to identify LMP-encoding genes. It has been shown that disruption of AT4g39850 resulted in an increase in the oil content in transgenic Arabidopsis seeds (WO2003008597-A2).

[0257] In order to identify LMP genes of interest in propriety databases, a similarity analysis using BLAST software (Basic Local Alignment Search Tool, Altschul et al., 1990, J. Mol. Biol. 215:403-410) was carried out. The amino acid sequence of the polypeptides encoded by the above mentioned genes was used as a query to search and align DNA databases from Brassica napus, Linum usitatissimum, Helianthuus annuus, Vernonia sp., Zea mays and Glycine max that were translated in all six reading frames, using the TBLASTN algorithm. Such similarity analysis of the BPS in-house databases resulted in the identification of numerous ESTs and cDNA contigs.

[0258] Gene sequences can be used to identify homologous or heterologous genes (orthologs, the same LMP gene from another plant) from cDNA or genomic libraries. This can be done by designing PCR primers to conserved sequences identified by multiple sequence alignments. Orthologs are often identified by designing degenerate primers to full-length or partial sequences of genes of interest.

[0259] Gene sequences can be used to identify homologues or orthologs from cDNA or genomic libraries. Homologous genes (e. g. full-length cDNA clones) can be isolated via nucleic acid hybridization using for example cDNA libraries: Depending on the abundance of the gene of interest, 100,000 up to 1,000,000 recombinant bacteriophages are plated and transferred to nylon membranes. After denaturation with alkali, DNA is immobilized on the membrane by e.g. UV cross-linking. Hybridization is carried out at high stringency conditions. Aqueous solution hybridization and washing is performed at an ionic strength of 1 M NaCl and a temperature of 68° C. Hybridization probes are generated by e. g. radioactive (32P) nick transcription labeling (High Prime, Roche, Mannheim, Germany). Signals are detected by autoradiography.

[0260] Partially homologous or heterologous genes that are related but not identical can be identified in a procedure analogous to the above-described procedure using low stringency hybridization and washing conditions. For aqueous hybridization, the ionic strength is normally kept at 1 M NaCl while the temperature is progressively lowered from 68 to 42° C. Isolation of gene sequences with homologies (or sequence identity/similarity) only in a distinct domain of (for example 10-20 amino acids) can be carried out by using synthetic radio labeled oligonucleotide probes. Radio labeled oligonucleotides are prepared by phosphorylation of the 5′ end of two complementary oligonucleotides with T4 polynucleotide kinase. The complementary oligonucleotides are annealed and ligated to form concatemers. The double stranded concatemers are than radiolabeled by for example nick transcription. Hybridization is normally performed at low stringency conditions using high oligonucleotide concentrations.

[0261] Oligonucleotide Hybridization Solution:

[0262] 6×SSC

[0263] M sodium phosphate

[0264] mM EDTA (pH 8)

[0265] 0.5% SDS

[0266] 100 μg/ml denaturated salmon sperm DNA

[0267] % nonfat dried milk

[0268] During hybridization, temperature is lowered stepwise to 5-10° C. below the estimated oligonucleotide Tm or down to room temperature followed by washing steps and autoradiography. Washing is performed with low stringency such as 3 washing steps using 4×SSC. Further details are described by Sambrook et al. (1989, “Molecular Cloning: A Laboratory Manual,” Cold Spring Harbor Laboratory Press) or Ausubel et al. (1994, “Current Protocols in Molecular Biology,” John Wiley & Sons).

### Example 6

[0269] Cloning of full-length cDNAs and orthologs of identified LMP genes. Clones corresponding to full-length sequences and partial cDNAs from Brassica napus, Glycine max, Zea mays, Helianthuus annuus, Vernonia sp., or Linum usitatissimum had been identified in the in-house proprietary Hyseq databases. The Hyseq clones of Brassica napus, Glycine max, Zea mays, Helianthuus annuus, Vernonia sp., and Linum usitatissimum genes were sequenced at DNA Landmarks using a ABI 377 slab gel sequencer and BigDye Terminator Ready Reaction kits (PE Biosystems, Foster City, Calif.). Sequence alignments were done to determine whether the Hyseq clones were full-length or partial clones. In cases where the Hyseq clones were determined to be partial cDNAs the following procedure was used to isolate the full-length sequences. Full-length cDNAs were isolated by RACE PCR using the SMART RACE cDNA amplification kit from Clontech allowing both 5′- and 3′ rapid amplification of cDNA ends (RACE). The RACE PCR primers were designed based on the Hyseq clone sequences. The isolation of full-length cDNAs and the RACE PCR protocol used were based on the manufacturer's conditions. The RACE product fragments were extracted from agarose gels with a QIAquick Gel Extraction Kit (Qiagen) and ligated into the TOPO pCR 2.1 vector (Invitrogen) following manufacturer's instructions. Recombinant vectors were transformed into TOP10 cells (Invitrogen) using standard conditions (Sambrook et al. 1989).

[0270] Transformed cells were grown overnight at 37° C. on LB agar containing 50 μg/ml kanamycin and spread with 40 μl of a 40 mg/ml stock solution of X-gal in dimethylformamide for blue-white selection. Single white colonies were selected and used to inoculate 3 ml of liquid LB containing 50 μg/ml kanamycin and grown overnight at 37° C. Plasmid DNA is extracted using the QIAprep Spin Miniprep Kit (Qiagen) following manufacturer's instructions. Subsequent analyses of clones and restriction mapping were performed according to standard molecular biology techniques (Sambrook et al. 1989). Full-length cDNAs were isolated and cloned into binary vectors by using the following procedure: Gene specific primers were designed using the full-length sequences obtained from Hyseq clones or subsequent RACE amplification products. Full-length sequences and genes were amplified utilizing Hyseq clones or cDNA libraries as DNA template using touchdown PCR. In some cases, primers were designed to add an “AACA” Kozak-like sequence just upstream of the gene start codon and two bases downstream were, in some cases, changed to GC to facilitate increased gene expression levels (Chandrashekhar et al. 1997, Plant Molecular Biology 35:993-1001). PCR reaction cycles were: 94° C., 5 min; 9 cycles of 94° C., 1 min, 65° C., 1 min, 72° C., 4 min and in which the anneal temperature was lowered by 1° C. each cycle; 20 cycles of 94° C., 1 min, 55° C., 1 min, 72° C., 4 min; and the PCR cycle was ended with 72° C., 10 min. Amplified PCR products were gel purified from 1% agarose gels using GenElute-EtBr spin columns (Sigma) and after standard enzymatic digestion, were ligated into the plant binary vector pSUN2 for transformation of Arabidopsis. The binary vector was amplified by overnight growth in E. coli DH5 in LB media and appropriate antibiotic and plasmid was prepared for downstream steps using Qiagen MiniPrep DNA preparation kit. The insert was verified throughout the various cloning steps by determining its size through restriction digest and inserts were sequenced to ensure the expected gene was used in Arabidopsis transformation.

### Example 7

### Identification of Genes of Interest by Screening Expression Libraries with Antibodies

[0271] cDNA clones can be used to produce recombinant protein for example in E. coli (e. g. Qiagen QIAexpress pQE system). Recombinant proteins are then normally affinity purified via Ni-NTA affinity chromatography (Qiagen). Recombinant proteins can be used to produce specific antibodies for example by using standard techniques for rabbit immunization. Antibodies are affinity purified using a Ni-NTA column saturated with the recombinant antigen as described by Gu et al. (1994, BioTechniques 17:257-262). The antibody can then be used to screen expression cDNA libraries to identify homologous or heterologous genes via an immunological screening (Sambrook et al. 1989, Molecular Cloning: A Laboratory Manual,” Cold Spring Harbor Laboratory Press or Ausubel et al. 1994, “Current Protocols in Molecular Biology,” John Wiley & Sons).

### Example 8

### Northern-Hybridization

[0272] For RNA hybridization, 20pg of total RNA or 1 μg of poly-(A)+ RNA is separated by gel electrophoresis in 1.25% agarose gels using formaldehyde as described in Amasino (1986, Anal. Biochem. 152:304), transferred by capillary attraction using 10×SSC to positively charged nylon membranes (Hybond N+, Amersham, Braunschweig), immobilized by UV light and pre-hybridized for 3 hours at 68° C. using hybridization buffer (10% dextran sulfate w/v, 1 M NaCl, 1% SDS, 100 μg/ml of herring sperm DNA). The labeling of the DNA probe with the Highprime DNA labeling kit (Roche, Mannheim, Germany) is carried out during the pre-hybridization using alpha-32P dCTP (Amersham, Braunschweig, Germany). Hybridization is carried out after addition of the labeled DNA probe in the same buffer at 68° C. overnight. The washing steps are carried out twice for 15 min using 2×SSC and twice for 30 min using 1×SSC, 1% SDS at 68° C. The exposure of the sealed filters is carried out at −70° C. for a period of 1 day to 14 days.

### Example 9

### DNA Sequencing and Computational Functional Analysis

[0273] cDNA-libraries can be used for DNA sequencing according to standard methods, in particular by the chain termination method using the ABI PRISM Big Dye Terminator Cycle Sequencing Ready Reaction Kit (Perkin-Elmer, Weiterstadt, Germany). Random sequencing can be carried out subsequent to preparative plasmid recovery from cDNA libraries via in vivo mass excision, retransformation, and subsequent plating of DH10B on agar plates (material and protocol details from Stratagene, Amsterdam, Netherlands). Plasmid DNA can be prepared from overnight grown E. coli cultures grown in Luria-Broth medium containing appropriate antibiotic chemicals (see Sambrook et al. (1989, Cold Spring Harbor Laboratory Press: ISBN 0-87969-309-6) on a Qiagene DNA preparation robot (Qiagen, Hilden) according to the manufacturer's protocols). Sequences can be processed and annotated using the software package EST-MAX commercially provided by Bio-Max (Munich, Germany). The program incorporates bioinformatics methods important for functional and structural characterization of protein sequences. For reference see http://pedant.mips.biochem.mpg.de.

[0274] The most important algorithms incorporated in EST-MAX are: FASTA: Very sensitive protein sequence database searches with estimates of statistical significance (Pearson W. R. 1990, Rapid and sensitive sequence comparison with FASTP and FASTA. Methods Enzymol. 183:63-98). BLAST: Very sensitive protein sequence database searches with estimates of statistical significance (Altschul S. F., Gish W., Miller W., Myers E. W. and Lipman D. J. Basic local alignment search tool. J. Mol. Biol. 215:403-410). PREDATOR: High-accuracy secondary structure prediction from single and multiple sequences. (Frishman & Argos 1997, 75% accuracy in protein secondary structure prediction. Proteins 27:329-335). CLUSTALW: Multiple sequence alignment (Thompson, J. D., Higgins, D. G. and Gibson, T. J. 1994, CLUSTAL W: improving the sensitivity of progressive multiple sequence alignment through sequence weighting, positions-specific gap penalties and weight matrix choice, Nucleic Acids Res. 22:4673-4680). TMAP: Transmembrane region prediction from multiply aligned sequences (Persson B. & Argos P. 1994, Prediction of transmembrane segments in proteins utilizing multiple sequence alignments, J. Mol. Biol. 237:182-192). ALOM2:Transmembrane region prediction from single sequences (Klein P., Kanehisa M., and DeLisi C. 1984, Prediction of protein function from sequence properties: A discriminant analysis of a database. Biochim. Biophys. Acta 787:221-226. Version 2 by Dr. K. Nakai). PROSEARCH: Detection of PROSITE protein sequence patterns. Kolakowski L. F. Jr., Leunissen J. A. M. and Smith J. E. 1992, ProSearch: fast searching of protein sequences with regular expression patterns related to protein structure and function. Biotechniques 13:919-921). BLIMPS: Similarity searches against a database of ungapped blocks (Wallace & Henikoff 1992, PATMAT: A searching and extraction program for sequence, pattern and block queries and databases, CABIOS 8:249-254. Written by Bill Alford).

### Example 10

### Plasmids for Plant Transformation

[0275] For plant transformation binary vectors such as pBinAR can be used (Höfgen & Willmitzer 1990, Plant Sci. 66:221-230). Construction of the binary vectors can be performed by ligation of the partial or full-length cDNA in sense or antisense orientation into the T-DNA. 5′ to the cDNA a plant promoter activates transcription of the cDNA. A polyadenylation sequence is located 3′ to the cDNA. Tissue-specific expression can be achieved by using a tissue specific promoter. For example, seed-specific expression can be achieved by cloning the napin or LeB4 or USP promoter 5′ to the cDNA. Also any other seed specific promoter element can be used. For constitutive expression within the whole plant the CaMV 35S promoter can be used. The expressed protein can be targeted to a cellular compartment using a signal peptide, for example for plastids, mitochondria, or endoplasmic reticulum (Kermode 1996, Crit. Rev. Plant Sci. 15:285-423). The signal peptide is cloned 5′ in frame to the cDNA to achieve subcellular localization of the fusion protein.

[0276] Further examples for plant binary vectors are the pSUN300 or pSUN2-GW vectors into which the LMP gene candidates are cloned. These binary vectors contain an antibiotic resistance gene driven under the control of the NOS promoter or a herbicide resistance marker under control of a constitutive promoter e.g. Ubiquitin or Actin promoters, and a seed-specific promoter in front of the candidate gene with the NOS terminator or the OCS terminator. Partial or full-length LMP cDNA are cloned into the multiple cloning site of the plant binary vector in sense or antisense orientation behind a seed-specific promoters e.g. USP, Napin or LegB4 promoters.

[0277] Table 3 lists the groups of genes for which an overexpression is desired. This will lead to a modified seed oil level.

[0278] Table 5 shows examples—not intended to be limiting—of constructs for overexpression of LMPs.

[0279] The recombinant vector containing the gene of interest is transformed into Top10 cells (Invitrogen) using standard conditions. Transformed cells are selected for on LB agar containing 50 μg/ml kanamycin grown overnight at 37° C. Plasmid DNA is extracted using the QIAprep Spin Miniprep Kit (Qiagen) following manufacturer's instructions. Analysis of subsequent clones and restriction mapping is performed according to standard molecular biology techniques (Sambrook et al. 1989, Molecular Cloning, A Laboratory Manual. 2^{nd} Edition. Cold Spring Harbor Laboratory Press. Cold Spring Harbor, N.Y.).

### Example 11

### Agrobacterium Mediated Plant Transformation

[0280] Agrobacterium mediated plant transformation with the LMP nucleic acids described herein can be performed using standard transformation and regeneration techniques (Gelvin, Stanton B. & Schilperoort R. A, Plant Molecular Biology Manual, 2nd ed. Kluwer Academic Publ., Dordrecht 1995 in Sect., Ringbuc Zentrale Signatur:BT11-P; Glick, Bernard R. and Thompson, John E. Methods in Plant Molecular Biology and Biotechnology, S. 360, CRC Press, Boca Raton 1993). For example, Agrobacterium mediated transformation can be performed using the GV3 (pMP90) (Koncz & Schell, 1986, Mol. Gen. Genet. 204:383-396) or LBA4404 (Clontech) Agrobacterium tumefaciens strain.

[0281] Arabidopsis thaliana can be grown and transformed according to standard conditions (Bechtold 1993, Acad. Sci. Paris. 316:1194-1199; Bent et al. 1994, Science 265:1856-1860). Additionally, rapeseed can be transformed with the LMP nucleic acids of the present invention via cotyledon, petiole or hypocotyl transformation (Moloney et al. 1989, Plant Cell Report 8:238-242; De Block et al. 1989, Plant Physiol. 91:694-701). Use of antibiotic for Agrobacterium and plant selection depends on the binary vector and the Agrobacterium strain used for transformation. Additionally, Agrobacterium mediated gene transfer to flax can be performed using, for example, a technique described by Mlynarova et al. (1994, Plant Cell Report 13:282-285).

[0282] The LMP genes were cloned into a binary vector and expressed either under the seed specific USP (unknown seed protein) promoter (Baeumlein et al. 1991, Mol. Gen. Genetics 225:459-67). Alternatively, the PtxA promoter (the promoter of the Pisum sativum PtxA gene), which is a promoter active in virtually all plant tissues or the superpromoter, which is a constitutive promoter (Stanton B. Gelvin, U.S. Pat. No. 5,428,147 and U.S. Pat. No. 5,217,903) or other seed-specific promoters like the legumin B4 promoter (LeB4; Baeumlein et al. 1992, Plant J. 2:233-239) as well as promoters conferring seed-specific expression in dicot plants like Arabidopsis, rapeseed, soybean, linseed etc. or monocot plants like maize, barley, wheat, rye, rice etc. were used.

[0283] The nptlI gene or the AHAS gene was used as a selectable marker in these constructs. Transformation of soybean can be performed using for example a technique described in EP 0424 047, U.S. Pat. No. 5,322,783 (Pioneer Hi-Bred International) or in EP 0397 687, U.S. Pat. No. 5,376,543, or U.S. Pat. No. 5,169,770 (University Toledo), or by any of a number of other transformation procedures known in the art. Soybean seeds are surface sterilized with 70% ethanol for 4 minutes at room temperature with continuous shaking, followed by 20% (v/v) Clorox supplemented with 0.05% (v/v) tween for 20 minutes with continuous shaking. Then the seeds are rinsed 4 times with distilled water and placed on moistened sterile filter paper in a Petri dish at room temperature for 6 to 39 hours. The seed coats are peeled off, and cotyledons are detached from the embryo axis. The embryo axis is examined to make sure that the meristematic region is not damaged. The excised embryo axes are collected in a half-open sterile Petri dish and air-dried to moisture content less than 20% (fresh weight) in a sealed Petri dish until further use.

[0284] The method of plant transformation is also applicable to Brassica napus and other crops. In particular, seeds of canola are surface sterilized with 70% ethanol for 4 minutes at room temperature with continuous shaking, followed by 20% (v/v) Clorox supplemented with 0.05 % (v/v) Tween for 20 minutes, at room temperature with continuous shaking. Then, the seeds are rinsed 4 times with distilled water and placed on moistened sterile filter paper in a Petri dish at room temperature for 18 hours. The seed coats are removed and the seeds are air dried overnight in a half-open sterile Petri dish. During this period, the seeds lose approximately 85% of their water content. The seeds are then stored at room temperature in a sealed Petri dish until further use.

[0285] Agrobacterium tumefaciens culture is prepared from a single colony in LB solid medium plus appropriate antibiotics (e.g. 100 mg/l streptomycin, 50 mg/l kanamycin) followed by growth of the single colony in liquid LB medium to an optical density at 600 nm of 0.8. Then, the bacteria culture is pelleted at 7000 rpm for 7 minutes at room temperature, and re-suspended in MS (Murashige & Skoog 1962, Physiol. Plant. 15:473-497) medium supplemented with 100 mM acetosyringone. Bacteria cultures are incubated in this pre-induction medium for 2 hours at room temperature before use. The axis of soybean zygotic seed embryos at approximately 44% moisture content are imbibed for 2 h at room temperature with the pre-induced Agrobacterium suspension culture. (The imbibition of dry embryos with a culture of Agrobacterium is also applicable to maize embryo axes). The embryos are removed from the imbibition culture and are transferred to Petri dishes containing solid MS medium supplemented with 2% sucrose and incubated for 2 days, in the dark at room temperature. Alternatively, the embryos are placed on top of moistened (liquid MS medium) sterile filter paper in a Petri dish and incubated under the same conditions described above. After this period, the embryos are transferred to either solid or liquid MS medium supplemented with 500 mg/l carbenicillin or 300 mg/l cefotaxime to kill the agrobacteria. The liquid medium is used to moisten the sterile filter paper. The embryos are incubated during 4 weeks at 25° C., under 440 μmol m⁻² s⁻¹ and 12 hours photoperiod. Once the seedlings have produced roots, they are transferred to sterile metromix soil. The medium of the in vitro plants is washed off before transferring the plants to soil. The plants are kept under a plastic cover for 1 week to favor the acclimatization process. Then the plants are transferred to a growth room where they are incubated at 25° C., under 440 μmol m⁻² s⁻¹ light intensity and 12 h photoperiod for about 80 days.

[0286] Samples of the primary transgenic plants (T₀) are analyzed by PCR to confirm the presence of T-DNA. These results are confirmed by Southern hybridization wherein DNA is size-separated by electrophoresis on a 1% agarose gel and transferred to a positively charged nylon membrane (Roche Diagnostics). The PCR DIG Probe Synthesis Kit (Roche Diagnostics) is used to prepare a digoxigenin-labeled probe by PCR as recommended by the manufacturer.

[0287] As an example for monocot transformation, the construction of PtxA promoter in combination with maize Ubiquitin intron and LMP nucleic acid molecules is described. The PtxA-LMP ortholog gene constructs in pUC are digested with PacI and XmaI. pBPSMM348 is digested with PacI and XmaI to isolate maize Ubiquitin intron (ZmUbi intron) followed by electrophoresis and the QIAEX II Gel Extraction Kit (cat#20021). The ZmUbi intron is ligated into the PtxA-LMP nucleic acid molecule in pUC to generate pUC based PtxA-ZmUbi intron-LMP nucleic acid molecule construct followed by restriction enzyme digestion with AfeI and PmeI. PtxA-ZmUbi intron LMP gene cassette is cut out of a Seaplaque low melting temperature agarose gel (SeaPlaque® GTG® Agarose catalog No. 50110) after electrophoresis. A monocotyledonous base vector containing a selectable marker cassette (Monocot base vector) is digested with PmeI. The LMP nucleic acid molecule expression cassette containing PtxA promoter-ZmUbi intron is ligated into the Monocot base vector to generate PtxA-ZmUbi intron-LMP construct (see FIG. 22). Subsequently, the PtxA-ZmUbi intron-LMP nucleic acid molecule construct is transformed into a recombinant LBA4404 strain containing pSB1 (super vir plasmid) using electroporation following a general protocol known in the art. Agrobacterium-mediated transformation in maize is performed using immature embryo following a protocol described in U.S. Pat. No. 5,591,616. An imidazolinoneherbicide selection is applied to obtain transgenic maize lines. In GUS expression experiments using the ptxA promoter::ZmUbi intron in maize strong expression was described in embryonic calli and roots (Song H-S. et al., 2004 PF 55368-2 US).

[0288] In general, a rice (or other monocot) LMP gene under a plant promoter like PtxA could be transformed into corn, or another crop plant, to generate effects of monocot LMP genes in other monocots, or dicot LMP genes in other dicots, or monocot genes in dicots, or vice versa. The plasmids containing these LMP -like coding sequences, 5′ of a promoter and 3′ of a terminator would be constructed in a manner similar to those described for construction of other plasmids herein.

### Example 12

### In vivo Mutagenesis

[0289] In vivo mutagenesis of microorganisms can be performed by incorporation and passage of the plasmid (or other vector) DNA through E. coli or other microorganisms (e.g. Bacillus spp. or yeasts such as Saccharomyces cerevisiae) that are impaired in their capabilities to maintain the integrity of their genetic information. Typical mutator strains have mutations in the genes for the DNA repair system (e.g., mutHLS, mutD, mutT, etc.; for reference, see Rupp W. D. 1996, DNA repair mechanisms, in: Escherichia coli and Salmonella, p. 2277-2294, ASM: Washington.). Such strains are well known to those skilled in the art. The use of such strains is illustrated, for example, in Greener and Callahan 1994, Strategies 7:32-34. Transfer of mutated DNA molecules into plants is preferably done after selection and testing in microorganisms. Transgenic plants are generated according to various examples within the exemplification of this document.

### Example 13

### Assessment of the mRNA Expression and Activity of a Recombinant Gene Product in the Transformed Organism

[0290] The activity of a recombinant gene product in the transformed host organism can be measured on the transcriptional or/and on the translational level. A useful method to ascertain the level of transcription of the gene (an indicator of the amount of mRNA available for translation to the gene product) is to perform a Northern blot (for reference see, for example, Ausubel et al. 1988, Current Protocols in Molecular Biology, Wiley: New York), in which a DNA fragment designed to bind to the gene of interest is labeled with a detectable tag (usually radioactive or chemiluminescent), such that when the total RNA of a culture of the organism is extracted, run on gel, transferred to a stable matrix and incubated with this probe, the binding and quantity of binding of the probe indicates the presence and also the quantity of mRNA for this gene. This information at least partially demonstrates the degree of transcription of the transformed gene. Total cellular RNA can be prepared from plant cells, tissues or organs by several methods, all well-known in the art, such as that described in Bormann et al. (1992, Mol. Microbiol. 6:317-326).

[0291] To assess the presence or relative quantity of protein translated from this mRNA, standard techniques, such as a Western blot, may be employed (see, for example, Ausubel et al. 1988, Current Protocols in Molecular Biology, Wiley: New York). In this process, total cellular proteins are extracted, separated by gel electrophoresis, transferred to a matrix such as nitrocellulose, and incubated with a probe, such as an antibody, which specifically binds to the desired protein. This probe is generally tagged with a chemiluminescent or colorimetric label, which may be readily detected. The presence and quantity of label observed indicates the presence and quantity of the desired mutant protein present in the cell.

[0292] The activity of LMPs that bind to DNA can be measured by several well-established methods, such as DNA band-shift assays (also called gel retardation assays). The effect of such LMP on the expression of other molecules can be measured using reporter gene assays (such as that described in Kolmar H. et al. 1995, EMBO J. 14:3895-3904 and references cited therein). Reporter gene test systems are well known and established for applications in both prokaryotic and eukaryotic cells, using enzymes such as beta-galactosidase, green fluorescent protein, and several others.

[0293] The determination of activity of proteins involved in the transport of lipids across membranes can be performed according to techniques such as those described in Gennis R. B. (1989 Pores, Channels and Transporters, in Biomembranes, Molecular Structure and Function, Springer: Heidelberg, pp. 85-137, 199-234 and 270-322).

### Example 14

### In vitro Analysis of the Function of Brassica napus, Linum usitatissimum, Zea mays, Helianthus annuus or Glycine max LMP Genes in Transgenic Plants

[0294] The determination of activities and kinetic parameters of enzymes is well established in the art. Experiments to determine the activity of any given altered enzyme must be tailored to the specific activity of the wild-type enzyme, which is well within the ability of one skilled in the art. Overviews about enzymes in general, as well as specific details concerning structure, kinetics, principles, methods, applications and examples for the determination of many enzyme activities may be found, for example, in the following references: Dixon, M. & Webb, E. C. 1979, Enzymes. Longmans: London; Fersht, (1985) Enzyme Structure and Mechanism. Freeman: New York; Walsh (1979) Enzymatic Reaction Mechanisms. Freeman: San Francisco; Price, N. C., Stevens, L. (1982) Fundamentals of Enzymology. Oxford Univ. Press: Oxford; Boyer, P. D., ed. (1983) The Enzymes, 3rd ed. Academic Press: New York; Bisswanger, H., (1994) Enzymkinetik, 2nd ed. VCH: Weinheim (ISBN 3527300325); Bergmeyer, H. U., Bergmeyer, J., Grafβl, M., eds. (1983-1986) Methods of Enzymatic Analysis, 3rd ed., vol. I-XII, Verlag Chemie: Weinheim; and Ullmann's Encyclopedia of Industrial Chemistry (1987) vol. A9, Enzymes. VCH: Weinheim, p. 352-363.

### Example 15

### Lipid Content in Transgenic Arabidopsis Plants Over-or Underexpressing the LMP Genes

[0295] Analysis of the Impact of Recombinant Proteins on the Production of a Desired Seed Storage Compound. Seeds from transformed Arabidopsis thaliana plants were analyzed by gas chromatography (GC) for total oil content and fatty acid profile. GC analysis reveals that Arabidopsis plants transformed with a construct containing USP promoter driving or down-regulating LMP genes show an increase in total seed oil content.

[0296] Plant lipids were extracted from plant material as described by Cahoon et al. (1999, Proc. Natl. Acad. Sci. USA 96, 22:12935-12940) and Browse et al. (1986, Anal. Biochemistry 442:141-145). Qualitative and quantitative lipid or fatty acid analysis is described in Christie, William W., Advances in Lipid Methodology. Ayr/Scotland:Oily Press.—(Oily Press Lipid Library; Christie, William W., Gas Chromatography and Lipids. A Practical Guide—Ayr, Scotland:Oily Press, 1989 Repr. 1992.-IX,307).

[0297] The effect of the genetic modification in plants on a desired seed storage compound (such as a sugar, lipid or fatty acid) can be assessed by growing the modified plant under suitable conditions and analyzing the seeds or any other plant organ for increased production of the desired product (i.e., a lipid or a fatty acid). Such analysis techniques are well known to one skilled in the art, and include spectroscopy, thin layer chromatography, staining methods of various kinds, enzymatic and microbiological methods, and analytical chromatography such as high performance liquid chromatography (see, for example, Ullman 1985, Encyclopedia of Industrial Chemistry, vol. A2, pp. 89-90 and 443-613, VCH: Weinheim; Fallon, A. et al. 1987, Applications of HPLC in Biochemistry in: Laboratory Techniques in Biochemistry and Molecular Biology, vol. 17; Rehm et al., 1993 Product recovery and purification, Biotechnology, vol. 3, Chapter III, pp. 469-714, VCH: Weinheim; Belter, P. A. et al., 1988 Bioseparations: downstream processing for biotechnology, John Wiley & Sons; Kennedy J. F. & Cabral J. M. S. 1992, Recovery processes for biological materials, John Wiley and Sons; Shaeiwitz J. A. & Henry J. D. 1988, Biochemical separations in: Ulmann's Encyclopedia of Industrial Chemistry, Separation and purification techniques in biotechnology, vol. B3, Chapter 11, pp. 1-27, VCH: Weinheim; and Dechow F. J. 1989).

[0298] Unequivocal proof of the presence of fatty acid products can be obtained by the analysis of transgenic plants following standard analytical procedures: GC, GC-MS or TLC as variously described by Christie and references therein (1997 in: Advances on Lipid Methodology 4th ed.: Christie, Oily Press, Dundee, pp. 119-169; 1998). Detailed methods are described for leaves by Lemieux et al. (1990, Theor. Appl. Genet. 80:234-240) and for seeds by Focks & Benning (1998, Plant Physiol. 118:91-101).

[0299] Positional analysis of the fatty acid composition at the sn-1, sn-2 or sn-3 positions of the glycerol backbone is determined by lipase digestion (see, e.g., Siebertz & Heinz 1977, Z. Naturforsch. 32c:193-205, and Christie 1987, Lipid Analysis 2^{nd} Edition, Pergamon Press, Exeter, ISBN 0-08-023791-6).

[0300] Total seed oil levels can be measured by any appropriate method. Quantitation of seed oil contents is often performed with conventional methods, such as near infrared analysis (NIR) or nuclear magnetic resonance imaging (NMR). NIR spectroscopy has become a standard method for screening seed samples whenever the samples of interest have been amenable to this technique. Samples studied include canola, soybean, maize, wheat, rice, and others. NIR analysis of single seeds can be used (see e.g. Velasco et al., “Estimation of seed weight, oil content and fatty acid composition in intact single seeds of rapeseed (Brassica napus L.) by near-infrared reflectance spectroscopy,” Euphytica, Vol. 106, 1999, pp. 79-85). NMR has also been used to analyze oil content in seeds (see e.g. Robertson & Morrison, “Analysis of oil content of sunflower seed by wide-line NMR,” Journal of the American Oil Chemists Society, 1979, Vol. 56, 1979, pp. 961-964, which is herein incorporated by reference in its entirety).

[0301] A typical way to gather information regarding the influence of increased or decreased protein activities on lipid and sugar biosynthetic pathways is for example via analyzing the carbon fluxes by labeling studies with leaves or seeds using ¹⁴C-acetate or ¹⁴C-pyruvate (see, e.g. Focks & Benning 1998, Plant Physiol. 118:91-101; Eccleston & Ohlrogge 1998, Plant Cell 10:613-621). The distribution of carbon-14 into lipids and aqueous soluble components can be determined by liquid scintillation counting after the respective separation (for example on TLC plates) including standards like ¹⁴C-sucrose and ¹⁴C-malate (Eccleston & Ohlrogge 1998, Plant Cell 10:613-621).

[0302] Material to be analyzed can be disintegrated via sonification, glass milling, liquid nitrogen and grinding or via other applicable methods. The material has to be centrifuged after disintegration. The sediment is re-suspended in distilled water, heated for 10 minutes at 100° C., cooled on ice and centrifuged again followed by extraction in 0.5 M sulfuric acid in methanol containing 2% dimethoxypropane for 1 hour at 90° C. leading to hydrolyzed oil and lipid compounds resulting in transmethylated lipids. These fatty acid methyl esters are extracted in petrolether and finally subjected to GC analysis using a capillary column (Chrompack, WCOT Fused Silica, CP-Wax-52 CB, 25 m, 0.32 mm) at a temperature gradient between 170° C. and 240° C. for 20 minutes and 5 min. at 240° C. The identity of resulting fatty acid methylesters is defined by the use of standards available form commercial sources (i.e., Sigma).

[0303] In case of fatty acids where standards are not available, molecule identity is shown via derivatization and subsequent GC-MS analysis. For example, the localization of triple bond fatty acids is shown via GC-MS after derivatization via 4,4-Dimethoxy-oxazolin-Derivaten (Christie, Oily Press, Dundee, 1998).

[0304] A common standard method for analyzing sugars, especially starch, is published by Stitt M., Lilley R. Mc. C., Gerhardt R. and Heldt M. W. (1989, “Determination of metabolite levels in specific cells and subcellular compartments of plant leaves,” Methods Enzymol. 174:518-552; for other methods see also Härtel et al. 1998, Plant Physiol. Biochem. 36:407-417 and Focks & Benning 1998, Plant Physiol. 118:91-101).

[0305] For the extraction of soluble sugars and starch, 50 seeds are homogenized in 500 μl of 80% (v/v) ethanol in a 1.5-ml polypropylene test tube and incubated at 70° C. for 90 min.

[0306] Following centrifugation at 16,000 g for 5 min, the supernatant is transferred to a new test tube. The pellet is extracted twice with 500 μl of 80% ethanol. The solvent of the combined supernatants is evaporated at room temperature under a vacuum. The residue is dissolved in 50 μl of water, representing the soluble carbohydrate fraction. The pellet left from the ethanol extraction, which contains the insoluble carbohydrates including starch, is homogenized in 200 μl of 0.2 N KOH, and the suspension is incubated at 95° C. for 1 h to dissolve the starch. Following the addition of 35 μl of 1 N acetic acid and centrifugation for 5 min at 16,000 g, the supernatant is used for starch quantification.

[0307] To quantify soluble sugars, 10 μl of the sugar extract is added to 990 μl of reaction buffer containing 100 mM imidazole, pH 6.9, 5 mM MgCl₂, 2 mM NADP, 1 mM ATP, and 2 units 2 ml⁻¹ of Glucose-6-P-dehydrogenase. For enzymatic determination of glucose, fructose and sucrose, 4.5 units of hexokinase, 1 unit of phosphoglucoisomerase, and 2 μl of a saturated fructosidase solution are added in succession. The production of NADPH is photometrically monitored at a wavelength of 340 nm. Similarly, starch is assayed in 30 μl of the insoluble carbohydrate fraction with a kit from Boehringer Mannheim.

[0308] An example for analyzing the protein content in leaves and seeds can be found by Bradford M. M. (1976, “A rapid and sensitive method for the quantification of microgram quantities of protein using the principle of protein dye binding,” Anal. Biochem. 72:248-254). For quantification of total seed protein, 15-20 seeds are homogenized in 250 μl of acetone in a 1.5-ml polypropylene test tube. Following centrifugation at 16,000 g, the supernatant is discarded and the vacuum-dried pellet is resuspended in 250 μl of extraction buffer containing 50 mM Tris-HCl, pH 8.0, 250 mM NaCl, 1 mM EDTA, and 1% (w/v) SDS. Following incubation for 2 h at 25° C., the homogenate is centrifuged at 16,000 g for 5 min and 200 ml of the supernatant will be used for protein measurements. In the assay, γ-globulin is used for calibration. For protein measurements, Lowry DC protein assay (Bio-Rad) or Bradford-assay (Bio-Rad) is used.

[0309] Enzymatic assays of hexokinase and fructokinase are performed spectropho-tometrically according to Renz et al. (1993, Planta 190:156-165), of phosphogluco-isomerase, ATP-dependent 6-phosphofructokinase, pyrophosphate-dependent 6-phospho-fructokinase, Fructose-1,6-bisphosphate aldolase, triose phosphate isomerase, glyceral-3-P dehydrogenase, phosphoglycerate kinase, phosphoglycerate mutase, enolase and pyruvate kinase are performed according to Burrell et al. (1994, Planta 194:95-101) and of UDP-Glucose-pyrophosphorylase according to Zrenner et al. (1995, Plant J. 7:97-107). Intermediates of the carbohydrate metabolism, like Glucose-1-phosphate, Glucose-6-phosphate, Fructose-6-phosphate, Phosphoenolpyruvate, Pyruvate, and ATP are measured as described in Härtel et al. (1998, Plant Physiol. Biochem. 36:407-417) and metabolites are measured as described in Jelitto et al. (1992, Planta 188:238-244).

[0310] In addition to the measurement of the final seed storage compound (i.e., lipid, starch or storage protein) it is also possible to analyze other components of the metabolic pathways utilized for the production of a desired seed storage compound, such as intermediates and side-products, to determine the overall efficiency of production of the compound (Fiehn et al. 2000, Nature Biotech. 18:1447-1161).

[0311] Yeast expression vectors comprising the nucleic acids disclosed herein, or fragments thereof, can be constructed and transformed into Saccharomyces cerevisiae using standard protocols. The resulting transgenic cells can then be assayed for alterations in sugar, oil, lipid, or fatty acid contents.

[0312] Similarly, plant expression vectors comprising the nucleic acids disclosed herein, or fragments thereof, can be constructed and transformed into an appropriate plant cell such as Arabidopsis, soybean, rapeseed, rice, maize, wheat, Medicago truncatula, etc., using standard protocols. The resulting transgenic cells and/or plants derived there from can then be assayed for alterations in sugar, oil, lipid, or fatty acid contents.

[0313] Additionally, the sequences disclosed herein, or fragments thereof, can be used to generate knockout mutations in the genomes of various organisms, such as bacteria, mammalian cells, yeast cells, and plant cells (Girke at al. 1998, Plant J. 15:39-48). The resultant knockout cells can then be evaluated for their composition and content in seed storage compounds, and the effect on the phenotype and/or genotype of the mutation. For other methods of gene inactivation include U.S. Pat. No. 6,004,804 “Non-Chimeric Mutational Vectors” and Puttaraju et al. (1999, “Spliceosome-mediated RNA trans-splicing as a tool for gene therapy,” Nature Biotech. 17:246-252).

### Example 16

### Purification of the Desired Product from Transformed Organisms

[0314] An LMP can be recovered from plant material by various methods well known in the art. Organs of plants can be separated mechanically from other tissue or organs prior to isolation of the seed storage compound from the plant organ. Following homogenization of the tissue, cellular debris is removed by centrifugation and the supernatant fraction containing the soluble proteins is retained for further purification of the desired compound. If the product is secreted from cells grown in culture, then the cells are removed from the culture by low-speed centrifugation and the supernatant is retained for further purification.

[0315] The supernatant fraction from either purification method is subjected to chromatography with a suitable resin, in which the desired molecule is either retained on a chromatography resin while many of the impurities in the sample are not, or where the impurities are retained by the resin, while the sample is not. Such chromatography steps may be repeated as necessary, using the same or different chromatography resins. One skilled in the art would be well-versed in the selection of appropriate chromatography resins and in their most efficacious application for a particular molecule to be purified. The purified product may be concentrated by filtration or ultrafiltration, and stored at a temperature at which the stability of the product is maximized.

[0316] There is a wide array of purification methods known to the art and the preceding method of purification is not meant to be limiting. Such purification techniques are described, for example, in Bailey J. E. & Ollis is D. F. 1986, Biochemical Engineering Fundamentals, McGraw-Hill:New York.

[0317] The identity and purity of the isolated compounds may be assessed by techniques standard in the art. These include high-performance liquid chromatography (HPLC), spectroscopic methods, staining methods, thin layer chromatography, analytical chromatography such as high performance liquid chromatography or gas-liquid chromatography, NIRS, enzymatic assay, or microbiologically. Such analysis methods are reviewed in: Patek et al. (1994, Appl. Environ. Microbiol. 60:133-140), Malakhova et al. (1996, Biotekhnologiya 11:27-32) and Schmidt et al. (1998, Bioprocess Engineer 19:67-70), Ulmann's Encyclopedia of Industrial Chemistry (1996, Vol. A27, VCH: Weinheim, p. 89-90, p. 521-540, p. 540-547, p. 559-566, 575-581 and p. 581-587) and Michal G. (1999, “Biochemical Pathways: An Atlas of Biochemistry and Molecular Biology,” John Wiley and Sons; Fallon, A. et al. 1987, Applications of HPLC in Biochemistry in: Laboratory Techniques in Biochemistry and Molecular Biology, vol. 17).

TABLE 1
Plant Lipid Classes

| | |
|---|---|
| Neutral Lipids | Triacylglycerol (TAG) |
| | Diacylglycerol (DAG) |
| | Monoacylglycerol (MAG) |
| Polar Lipids | Monogalactosyldiacylglycerol (MGDG) |
| | Digalactosyldiacylglycerol (DGDG) |
| | Phosphatidylglycerol (PG) |
| | Phosphatidylcholine (PC) |
| | Phosphatidylethanolamine (PE) |
| | Phosphatidylinositol (PI) |
| | Phosphatidylserine (PS) |
| | Sulfoquinovosyldiacylglycerol |

TABLE 2
Common Plant Fatty Acids

| | |
|---|---|
| 16:0 | Palmitic acid |
| 16:1 | Palmitoleic acid |
| 16:3 | Palmitolenic acid |
| 18:0 | Stearic acid |
| 18:1 | Oleic acid |
| 18:2 | Linoleic acid |
| 18:3 | Linolenic acid |
| y-18:3 | Gamma-linolenic acid* |
| 20:0 | Arachidic acid |
| 20:1 | Eicosenoic acid |
| 22:6 | Docosahexanoic acid (DHA)* |
| 20:2 | Eicosadienoic acid |
| 20:4 | Arachidonic acid (AA)* |
| 20:5 | Eicosapentaenoic acid (EPA)* |
| 22:1 | Erucic acid |

[0318] These fatty acids do not normally occur in plant seed oils, but their production in transgenic plant seed oil is of importance in plant biotechnology.

### Example 17

### Construction of a Binary Construct for Suppression of Translation an LMP

[0319] The RNAi construct to down-regulate the CTS fatty acid transproter activity was generated synthetically by the company Febit (Heidelberg, Germany). In detail, a 302 by fragment of the B. napus ortholog of CTS (Seq Id No. 68) was fused in direct and reverse complement orientation to the ends of a sequence from Physcomitrella patens, which acts as a linker between both complementary CTS fragments.

[0320] In addition restriction enzyme recognition enzymes for the enzymes AscI and PacI were fused to the 5′ and 3′ end respectively and the whole fragment cloned into the vector pSC-A (Stratagene, La Jolla, Calif.) following the manual instructions. The construct was then digested with the restriction enzymes AscI and PacI and the RNAi fragment purified by gel electrophoresis and elution of the fragment using the illustra GFX™ PCR DNA and Gel Band Purification Kit (GE Healthcare) following the instruction in the user manual. The Sequence was then ligated into the vector p-ENTR-A between the seed specific USP promoter and the CaMV 35S terminator.

[0321] Finally the vector was used in a Gateway® reaction with an empty pENTR-B and pENTR-C nd a pSUN2-based Destination vector to create the binary plant transformation vector that is used for plant transformation.

[0322] Table 3 lists the groups of genes for which a downregulation of expression or suppression of translation is desired. Such a downregulation or suppression will lead to a increased seed oil level. Preferably but not limiting RNAi is used for the downregulation.

TABLE 3
A table showing the modulation of expression of the LMPs

| Gene | Group | Modulation |
|---|---|---|
| rdm1/sdp1 | 1 | Downregulation |
| rdm1 like | 2 | Downregulation |
| Lipase TGL1 | 3 | Downregulation |
| Lysosomal lipase | 4 | Downregulation |
| Stratos lipase | 5 | Overexpression seed-specifically in early |
| | | seed development but not limited |
| | | to, downregulation seed-specifically |
| | | in late seed development and seed |
| | | maturation but not limited to |
| Homeodomain protein | 6 | Overexpression |
| CAO | 7 | Downregulation |
| 14-3-3-stay green | 8 | Overexpression |
| cts | 9 | Downregulation |
| human lipase like | 10 | Downregulation |

[0323] Examples of such downregulation constructs are described below. These examples are not intended to be limiting in any way. As the person skilled in the art is aware there are a number of ways available to achieve downregulation for a sequence of interest.

[0324] RNAi construct covering the 3′ end of the Bnrdml and Bnrdml like genes (SEQ ID NO. 2, 4, 9 and 11) and part of the 3′ UTR

SEQ ID NO. 155

Ggagagtgtacagatagatatacctgagagggagatggataatagctctg
tctcaggacatgaagatgataatgatgataatgatgatgaagaagaagaa
cataagggctcggttccggttaaagattccggtttacaagattcttgtag
tgtaatagatgcttagactgatttgatccgagtgaagagattcttgttca
gcaaagatcttggagtgttttagtgctttgtaaatagtacaactataggc
cgcaagtaaggtgcatgttgtgtatgtttgcagtgattatgttgaaaatt
caacagtatgcgtttgcggagatgcttgccattgcaggctatttgatcac
actgtttggcgacctcatcatccagcggctgatcctccgcggtgctcgtt
cgtctgcgcagctaggttctttggacggcgaaaaggatggggctgcgaaa
ttagatgagaagggtcgggcagaagtgaatgcgacgctgttacatcgagc
ttcatttggacaattttcaacataatcactgcaaacatacacaacatgca
ccttacttgcggcctatagttgtactatttacaaagcactaaaacactcc
aagatctttgctgaacaagaatctcttcactcggatcaaatcagtctaag
catctattacactacaagaatcttgtaaaccggaatctttaaccggaacc
gagcccttatgttcttcttcttcatcatcattatcatcattatcatcttc
atgtcctgagacagagctattatccatctccctctcaggtatatctatct
gtacactctcc

[0325] RNAi construct covering the 5′ end of the Bnrdml and Bnrdml like genes (SEQ ID NO. 2, 4, 10 and 11) and part of the 5′ UTR

SEQ ID NO. 156

Atggatataagcaacgaggccaatgtcgatcccttctcaatcggaccaac
ctccatcctcggccgaaccatcgccttccgagtcctcttctgcaaatcaa
tgctccagctccgccgcgacctcttccgcttcctcctccactggttcctc
acactcaagctcgccgtctccccctttgtctcctggttccacccccggaa
cccccaggggatcctcgccgtcgtcacgatcatcgccttcgtcctgaaac
gctacaccaacgtgaaggccaaggccgagatggcctaccgtagaaagttc
caacagtatgcgtttgcggagatgcttgccattgcaggctatttgatcac
actgtttggcgacctcatcatccagcggctgatcctccgcggtgctcgtt
cgtctgcgcagctaggttctttggacggcgaaaaggatggggctgcgaaa
ttagatgagaagggtcgggcagaagtgaatgcgacgctgttacatcgagc
ttcatttggacgaactttctacggtaggccatctcggccttggccttcac
gttggtgtagcgtttcaggacgaaggcgatgatcgtgacgacggcgagga
tcccctgggggttccgggggtggaaccaggagacaaagggggagacggcg
agcttgagtgtgaggaaccagtggaggaggaagcggaagaggtcgcggcg
gagctggagcattgatttgcagaagaggactcggaaggcgatggttcggc
cgaggatggaggttggtccgattgagaagggatcgacattggcctcgttg
cttatatccat

[0326] RNAi construct to downregulate Bncts (also called BnPXA1) sequences (SEQ ID NO. 68, 70 to 72):

SEQ ID NO. 157

Cgacacaaagttcagggcactattggaccattctctcatgctcttgaaga
agaaatggttgtatggcatacttgatgatttcgtgacaaagcaacttccc
aataatgtgacttggggattaagtttgttgtatgctttagaacacaaggg
agatagagcacttgtctccactcaaggtgaattggcacatgcattgcggt
atctagcttctgtcgtctcccaaagctttatggcgtttggtgatattctt
gaactacacaagaagttccttgagctctctggtggtattaacagaatttt
cgttaattaaaatttaaatcaacagtatgcgtttgcggagatgcttgcca
ttgcaggctatttgatcacactgtttggcgacctcatcatccagcggctg
atcctccgcggtgctcgttcgtctgcgcagctaggttctttggacggcga
aaaggatggggctgcgaaattagatgagaagggtcgggcagaagtgaatg
cgacgctgttacatcgagcttcatttggactttaattaaggtacccgaaa
attctgttaataccaccagagagctcaaggaacttcttgtgtagttcaag
aatatcaccaaacgccataaagctttgggagacgacagaagctagatacc
gcaatgcatgtgccaattcaccttgagtggagacaagtgctctatctccc
ttgtgttctaaagcatacaacaaacttaatccccaagtcacattattggg
aagttgctttgtcacgaaatcatcaagtatgccatacaaccatttcttct
tcaagagcatgagagaatggtccaatagtgccctgaactttgtgtcg

[0327] RNAi construct to downregulate BnCAO sequences(SEQ ID NO. 39, 41 and 43)

SEQ ID NO. 158

atgaacgccgccgtgtttacttcttctgctttatctctacccatatcctt
ctgtaagactagatcatctcaactcaccagaaagaagggagtgaaaggag
agttcagggtttttgctgtgtttggggaagatagtggattagttgagaag
aagagtcaatgggggcatttgtttgatgtggaggatcccagatcgaaaac
tcctccttataaaggcaagttcatggatgtaaaccaagctcttgaagttg
ctaggttcgatatccaatatttggattggcgtgctcgtcaagatcttctt
accatcatgctcctttaacctaaaggcctcaacagtatgcgtttgcggag
atgcttgccattgcaggctatttgatcacactgtttggcgacctcatcat
ccagcggctgatcctccgcggtgctcgttcgtctgcgcagctaggttctt
tggacggcgaaaaggatggggctgcgaaattagatgagaagggtcgggca
gaagtgaatgcgacgctgttacatcgagcttcatttggacctcgagttag
gcctttaggttaaaggagcatgatggtaagaagatcttgacgagcacgcc
aatccaaatattggatatcgaacctagcaacttcaagagcttggtttaca
tccatgaacttgcctttataaggaggagttttcgatctgggatcctccac
atcaaacaaatgcccccattgactcttcttctcaactaatccactatctt
ccccaaacacagcaaaaaccctgaactctcctttcactcccttctttctg
gtgagttgagatgatctagtcttacagaaggatatgggtagagataaagc
agaagaagtaaacacggcggcgttcat

TABLE 4
Example of constructs for downregulation.

| | Promoter | SEQ ID NOs. | Terminator |
|---|---|---|---|
| 1 | p-BnGLP | 158 | t-At GLP |
| 2 | p-USP | 157 | t-CaMV35S |
| 3 | p-USP | 155 | t-OCS |
| 4 | p-Napin | 156 | t-OCS |

[0328] These constructs are transformed and lead to increased seed oil.

TABLE 5
Examples of constructs for overexpression.

| | Promoter | SEQ ID NOs. | Terminator |
|---|---|---|---|
| 1 | p-USP | 33 | t-CaMV35S |
| 2 | p-USP | 56 | t-CaMV35S |
| 3 | p-USP | 28 | t-OCS |

[0329] These constructs are transformed and lead to increased seed oil.

TABLE 6
A table of the functions of the LMPs

| Gene | group | funktion | SEQ ID NOs. |
|---|---|---|---|
| rdm1/sdp1 | 1 | Lipase | 1 to 8, 93 to 100, |
| | | | 159 to 168 |
| rdm1 like | 2 | Lipase | 9 to 13, 101 to 106, |
| | | | 169 to 172 |
| Lipase TGL1 | 3 | Lipase | 14 to 16, 107 to 111 |
| Lysosomal lipase | 4 | Lipase | 17 to 26, 112 to 115 |
| Stratos lipase | 5 | Lipase | 27 to 32, 116 to 123 |
| Homeodomain | 6 | transcription factor | 33 to 38, 124 to 131 |
| protein | | chlorophyllide A | |
| CAO | 7 | Oxidase | 39 to 51, 132 to 139 |
| 14-3-3- stay green | 8 | Signal transducer | 52 to 67, 140 to 143 |
| cts | 9 | Fatty acid transporter | 68 to 84, 144 to 148 |
| human lipase like | 10 | Lipase | 85 to 92, 149 to 154 |

### Example 18

### Down-Regulation of TAG Lipase in Brassica napus

[0330] In order to down-regulate the expression of the TAG lipases in Brassica napus containing sequences listed in SEQ ID NO. 2, 4 and 11 a RNAi construct was generated.

[0331] To do so a 300 by sequence stretch was identified that is 100% identical to a 300 by stretch at the 3′ end of SEQ ID NO. 11 and 99% identical to a 166 by stretch at the 3′ end of SEQ ID NO. 2 and 4. This 300 by sequence (SEQ ID NO. 155) was fused in direct and in reverse-complement orientation to the ends of a 211 by sequence from Physcomitrella patens, which acts as a linker between the complementary fragments.

[0332] This RNAi construct was then fused with the USP promoter from Vicia faba, driving the seed-specific expression of the RNAi construct and the OCS terminator from Agrobacterium tumefaciens, terminating the expression. The expression construct was then cloned into the vector pENTR-A and used in a Gateway® reaction with an empty pENTR-B and pENTR-C and a pSUN2-based destination vector to create the binary plant transformation vector that is used for plant transformation.

[0333] Transgenic plants were generated as described in Example 10 and selected using a herbicide resistance marker expressed under the control of a constitutive promoter. The transgenic plants have been analyzed at the molecular level for their transgenicity and the copy number of the integrated T-DNA. Through this, 36 independent events were generated. Each plant was duplicated by cutting of the main shoot and placing it in a medium for root setting. The original and the clone plant where then grown in the green house under controlled conditions until they produced sufficient seeds for the oil content determination by NIRS. The same procedure was done with wild-type regenerates that were used as controls for analyzing the effect of the down-regulation on the seed oil content.

[0334] In Table 1 the seed oil content of the 36 transgenic events (original and clone) are shown. Furthermore, the average seed oil content of the original and clone was compared to the average seed oil content of all control plants shown in Table 2.

[0335] In the graph of FIG. 1 the relative oil changes in T1 seeds of all generated transgenic plants compared to the wild type control are shown. 34 out of the 36 generated transgenic events (95%) showed a increase in the seed oil content, ranging from 1% to almost 7%.

[0336] In FIG. 2 a seed oil content frequency distribution analysis is illustrated. For this purpose, the events were clustered based on their seed oil content into 1% bins ranging from a seed oil content of 41% to 46% (e.g. bin1=40.5% -41.5%, bin2=41.5% −42.5 % etc.). It can be seen that for the transgenic events the distribution is clearly shifted towards a higher oil content with an average seed oil content of 42.8% in the wild type plants and an average seed oil content of 43.9% in the transgenic events. This represents an average oil content increase of 2.64% with a statistical confidence of 99.99% determined by ANOVA analysis.

[0337] The variation in the seed oil content increase among the different events can be explained by the different expression strength of the RNAi construct, which depends strongly on the locus the T-DNA has been integrated. Therefore, the seed oil content of the high performing events will show at least the same increase in the seed oil content in the range of 5% -7% in the next generation. Furthermore, the T1 seed pools represent segregating populations, which still containing null-segregants “diluting” the actual high oil phenotype of at least 25%. Therefore, the determined oil increase is expected to even increase further in the T2 seed pools to 10% or more.

[0338] Table 1: Oil content in transgenic plants engineered to down regulate the RDM1/SDP1 TAG lipase encoded by SEQ ID NO. 2, 4 and 11.

TABLE 1
Oil content in transgenic plants engineered to down regulate the
RDM1/SDP1 TAG lipase encoded by SEQ ID NO. 2, 4 and 11.

| Event | Plant | Oil content | Average Oil Content | Relative Change |
|---|---|---|---|---|
| Event 001 | original | 43.4 | 43.5 ± 0.2 | 1.8% |
| | clone | 43.7 | | |
| Event 002 | original | 44.1 | 43.4 ± 0.9 | 1.6% |
| | clone | 42.8 | | |
| Event 004 | original | | 43.9 ± 0.0 | 2.7% |
| | clone | 43.9 | | |
| Event 006 | original | 42.8 | 43.2 ± 0.6 | 1.0% |
| | clone | 43.6 | | |
| Event 009 | original | 44.0 | 43.7 ± 0.5 | 2.2% |
| | clone | 43.4 | | |
| Event 015 | original | 44.4 | 44.6 ± 0.3 | 4.3% |
| | clone | 44.8 | | |
| Event 019 | original | 44.7 | 44.0 ± 0.9 | 2.9% |
| | clone | 43.4 | | |
| Event 020 | original | 42.9 | 42.2 ± 1.0 | −1.5% |
| | clone | 41.5 | | |
| Event 022 | original | 44.3 | 43.8 ± 0.7 | 2.4% |
| | clone | 43.4 | | |
| Event 024 | original | | 44.1 0.0 | 3.2% |
| | clone | 44.1 | | |
| Event 026 | original | 44.5 | 43.3 ± 1.6 | 1.3% |
| | clone | 42.2 | | |
| Event 030 | original | | 42.0 0.0 | −1.8% |
| | clone | 42.0 | | |
| Event 031 | original | 44.8 | 44.2 ± 0.9 | 3.2% |
| | clone | 43.5 | | |
| Event 037 | original | 43.6 | 43.7 ± 0.1 | 2.1% |
| | clone | 43.7 | | |
| Event 040 | original | 43.7 | 43.8 ± 0.2 | 2.4% |
| | clone | 43.9 | | |
| Event 042 | original | | 43.5 ± 0.0 | 1.7% |
| | clone | 43.5 | | |
| Event 062 | original | 45.3 | 44.9 ± 0.7 | 4.9% |
| | clone | 44.4 | | |
| Event 068 | original | 45.0 | 44.2 ± 1.1 | 3.3% |
| | clone | 43.5 | | |
| Event 071 | original | 45.0 | 44.4 ± 0.8 | 3.8% |
| | clone | 43.8 | | |
| Event 072 | original | 45.2 | 45.2 ± 0.0 | 5.7% |
| | clone | 45.2 | | |
| Event 073 | original | 44.4 | 44.4 ± 0.0 | 3.7% |
| | clone | | | |
| Event 075 | original | 44.4 | 44.7 ± 0.4 | 4.5% |
| | clone | 45.0 | | |
| Event 080 | original | 43.1 | 43.6 ± 0.7 | 1.9% |
| | clone | 44.1 | | |
| Event 081 | original | 44.0 | 43.5 ± 0.8 | 1.6% |
| | clone | 43.0 | | |
| Event 084 | original | 44.7 | 44.1 ± 0.8 | 3.0% |
| | clone | 43.5 | | |
| Event 090 | original | 44.5 | 44.5 ± 0.0 | 4.1% |
| | clone | 44.5 | | |
| Event 092 | original | 45.2 | 44.8 ± 0.5 | 4.8% |
| | clone | 44.5 | | |
| Event 094 | original | 44.0 | 44.0 ± 0.0 | 2.7% |
| | clone | 44.0 | | |
| Event 101 | original | 44.5 | 44.2 ± 0.4 | 3.4% |
| | clone | 44.0 | | |
| Event 104 | original | 43.3 | 43.6 ± 0.5 | 2.0% |
| | clone | 44.0 | | |
| Event 112 | original | 43.7 | 43.8 ± 0.3 | 2.5% |
| | clone | 44.0 | | |
| Event 114 | original | 45.7 | 45.7 0.0 | 6.8% |
| | clone | | | |
| Event 115 | original | | 44.1 0.0 | 3.1% |
| | clone | 44.1 | | |
| Event 126 | original | | 43.3 0.0 | 1.2% |
| | clone | 43.3 | | |
| Event 130 | original | 43.2 | 43.3 ± 0.1 | 1.2% |
| | clone | 43.4 | | |
| Event 131 | original | 43.0 | 43.2 ± 0.2 | 1.0% |
| | clone | 43.4 | | |

TABLE 2
Seed oil content Brassica napus cv. Kumily used as controls
to determine oil changes in the transgenic plants.

| Event | Plant | Oil content | Average Oil Content |
|---|---|---|---|
| WT 10 | original | 43.2 | 42.8 ± 0.5 |
| | clone | 42.5 | |
| WT 11 | original | 42.6 | 42.4 ± 0.3 |
| | clone | 42.2 | |
| WT 15 | original | 42.9 | 43.1 ± 0.3 |
| | clone | 43.2 | |
| WT 5 | original | 42.8 | 42.9 ± 0.1 |
| | clone | 42.9 | |

TABLE 3
Orthologs of rdm1 and rdm1 like genes

| | Nucleotid | Amino acid | Amino Acid | Nucleotid | Amino acid | Amino Acid |
|---|---|---|---|---|---|---|
| | Identitiy | Identity | Similarity | Identitiy | Identity | Similarity |
| | SEQ ID | SEQ ID | SEQ ID | SEQ ID | SEQ ID | SEQ ID |
| | NO: 02 | NO: 03 | NO: 03 | NO: 11 | NO: 12 | NO: 12 |
| Corn TAG Lipase Ortholog 1 | 66% | 61% | 78% | 65% | 57% | 73% |
| Corn TAG Lipase Ortholog 2 | 66% | 61% | 77% | 65% | 56% | 73% |
| Soy TAG Lipase Ortholog 1 | 57% | 42% | 60% | 58% | 42% | 60% |
| Soy TAG Lipase Ortholog 2 | 72% | 79% | 89% | 70% | 73% | 82% |
| Soy TAG Lipase Ortholog 3 | 70% | 70% | 82% | 68% | 66% | 77% |
| Soy TAG Lipase Ortholog 4 | 68% | 66% | 78% | 68% | 61% | 70% |
| Soy TAG Lipase Ortholog 5 | 69% | 55% | 70% | 67% | 53% | 68% |

1-17. (canceled)

18. A polynucleotide comprising a nucleic acid sequence selected from the group consisting of:
(a) a nucleic acid sequence as shown in any one of SEQ ID NO: 1, 2, 4, 6, 7, 9 to 11, 13, 14, 16, 17, 19, 20, 22, 24, 25, 27, 28, 30, 32, 33, 35, 37 to 40, 42, 44, 46, 48, 50, 51, 53, 55, 57, 59, 61, 63, 65, 67, 69 to 85, 87, 89, or 91;
(b) a nucleic acid sequence encoding a polypeptide having an amino acid sequence as shown in any one of SEQ ID NO: 3, 5, 8, 12, 15, 18, 21, 23, 26, 29, 31, 34, 36, 41, 43, 45, 47, 49, 52, 54, 56, 58, 60, 62, 64, 66, 68, 86, 88, 90, or 92;
(c) a nucleic acid sequence which is at least 70% identical to the nucleic acid sequence of (a) or (b), wherein said nucleic acid sequence encodes a polypeptide being capable of altering the seed storage content and wherein said polypeptide comprises at least one of the amino acid sequences shown in any one of SEQ ID NO: 93 to 154; and
(d) a nucleic acid sequence being a fragment of any one of (a) to (c), wherein said fragment encodes a polypeptide or biologically active portion thereof being capable of altering the seed storage content and wherein said polypeptide or biologically active portion comprises at least one of the amino acid sequences shown in any one of SEQ ID NO: 93 to 154.

19. A polynucleotide comprising a nucleic acid sequence selected from the group consisting of:
(a) a nucleic acid sequence as shown in any one of SEQ ID NO: 159, 161, 163, 165, 167, 169, or 171;
(b) a nucleic acid sequence encoding a polypeptide having an amino acid sequence as shown in any one of SEQ ID NO: 160, 162, 164, 166, 168, 170, or 172;
(c) a nucleic acid sequence which is at least 70% identical to the nucleic acid sequence of (a) or (b), wherein said nucleic acid sequence encodes a polypeptide being capable of altering the seed storage content; and
(d) a nucleic acid sequence being a fragment of any one of (a) to (c), wherein said fragment encodes a polypeptide or biologically active portion thereof being capable of altering the seed storage content.

20. The polynucleotide of claim 18, wherein said polynucleotide is DNA or RNA.

21. A vector comprising the polynucleotide of claim 18.

22. The vector of claim 21, wherein said vector is an expression vector.

23. A host cell comprising the polynucleotide of claim 18.

24. A method for the manufacture of a polypeptide being capable of altering the seed storage content comprising:
(a) expressing the polynucleotide of claim 18 in a host cell; and
(b) obtaining the polypeptide encoded by said polynucleotide from the host cell.

25. A polypeptide encoded by the polynucleotide of claim 18.

26. An antibody which specifically recognizes the polypeptide of claim 25.

27. A transgenic non-human organism comprising the polynucleotide of claim 18.

28. The transgenic non-human organism of claim 27, wherein said non-human transgenic organism is a plant.

29. A method for the manufacture of an oil, a lipid or a fatty acid comprising the steps of:
(a) cultivating the host cell of claim 23 under conditions allowing synthesis of said oil, lipid or fatty acid; and
(b) obtaining said oil, lipid or fatty acid from the host cell or the transgenic non-human organism.

30. A method for the manufacture of an oil, a lipid or a fatty acid comprising the steps of:
(a) cultivating the transgenic non-human organism of claim 27 under conditions allowing synthesis of said oil, lipid or fatty acid; and
(b) obtaining said oil, lipid or fatty acid from the host cell or the transgenic non-human organism.

31. A method for the manufacture of a plant having a modified amount of a seed storage compound comprising the steps of:
(a) introducing the polynucleotide of claim 18 into a plant cell; and
(b) generating a transgenic plant from said plant cell, wherein the polypeptide encoded by the polynucleotide modifies the amount of said seed storage compound in the transgenic plant.

32. The method of claim 31, wherein the amount of said seed storage compound is increased compared to a non-transgenic control plant.

33. The method of claim 31, wherein said seed storage compound is an oil, a lipid or a fatty acid.

34. A oligonucleotide comprising a sequence of at least 32 nucleotides in length complementary to the nucleic acid sequence of the polynucleotide of claim 18.

35. The oligonucleotide of claim 33, wherein said oligonucleotide is capable of down regulating the expression of said polynucleotide.

The application's sequence listing, which the Patent Office published only in electronic form, follows.

SEQUENCE LISTING (172 sequences)

SEQ ID NO: 1 - DNA, 1278 bp, Brassicca napus
gaaaaatagttctctgcttcacgtttcttctttgcttctctgaccttccaagtcccacgctcagttaaacacacacacacataacctccaatggatataagcaacgaggccaatgtcgatcccttctcaatcggaccaacctccatcctcggccgaaccatcgccttccgagtcctcttctgcaaatcaatgctccagctccgccgcgacctcttccgcttcctcctccactggttcctcacactcaagctcgccgtctccccctttgtctcctggttccacccccggaacccccaggggatcctcgccgtcgtcacgatcatcgccttcgtcctgaaacgctacaccaacgtgaaggccaaggccgagatggcctaccgtagaaagttctggaggaacatgatgcgcgcggcgttgacttacgaggaatgggctcacgccgctaagatgttggataaagagactccgaagatgaacgagtccgatctttacgatgaagagttggttaagaacaagctaatggagcttcgtcatcgacgtcaagaaggctctctgagagacattatgttctgtatgagagctgatctcgtgaggaacctcgggaacatgtgtaaccctgagctgcacaaagggagactccaagttcctagacatatcaaagagtatatagacgaagtctctactcagctgagaatggtatgcaacaactctgagtccttagaagacctttctttagatgagaagctttctttcatgcacgagacgcgtcacgcctttggtagaactgctttgctactaagcggcggggcctctctaggcgcgtttcatgtcggtgttgtcaggactcttgtcgagcataagcttttacctcggatcatcgccggctctagcgtcggctcaataatctgctcggtcgtagcgtcaagatcctggccagagctgcagagcttcttcgagaactcgttacactctctccagttctttgaccagctaggaagcgttttcacgatcgtgaaacgcgtcatgacgcaaggagcgttgcacgacatcagacagctgcagtgcatgcttaggaacctcacgtgtaacctcacgttccaagaggcttatgatctgacggggaggatactcgggataacggtttgctcaccgaggaagcacgagccgcctcggtgtttaaactatctcacttctcctcacgtggtgatatggagcgcggtgactgcttcttgtgctttccctggtttgtttgaggctcaggagctgatggctaaagat

SEQ ID NO: 2 - DNA, 2469 bp, Brassica napus
  sdp1
  CDS (1)..(2469)
atggatataagcaacgaggccaatgtcgatcccttctcaatcggaccaacctccatcctcggccgaaccatcgccttccgagtcctcttctgcaaatcaatgctccagctccgccgcgacctcttccgcttcctcctccactggttcctcacactcaagctcgccgtctccccctttgtctcctggttccacccccggaacccccaggggatcctcgccgtcgtcacgatcatcgccttcgtcctgaaacgctacaccaacgtgaaggccaaggccgagatggcctaccgtagaaagttctggaggaacatgatgcgcgcggcgttgacttacgaggaatgggctcacgccgctaagatgttggataaagagactccgaagatgaacgagtccgatctttacgatgaagagttggttaagaacaagctaatggagcttcgtcatcgacgtcaagaaggctctctgagagacattatgttctgtatgagagctgatctcgtgaggaacctcgggaacatgtgtaaccctgagctgcacaaagggagactccaagttcctagacatatcaaagagtatatagacgaagtctctactcagctgagaatggtatgcaacaactctgagtccttagaagacctttctttagatgagaagctttctttcatgcacgagacgcgtcacgcctttggtagaactgctttgctactaagcggcggggcctctctaggcgcgtttcatgtcggtgttgtcaggactcttgtcgagcataagcttttacctcggatcatcgccggctctagcgtcggctcaataatctgctcggtcgtagcgtcaagatcctggccagagctgcagagcttcttcgagaactcgttacactctctccagttctttgaccagctaggaagcgttttcacgatcgtgaaacgcgtcatgacgcaaggagcgttgcacgacatcagacagctgcagtgcatgcttaggaacctcacgtgtaacctcacgttccaagaggcttatgatctgacggggaggatactcgggataacggtttgctcaccgaggaagcacgagccgcctcggtgtttaaactatctcacttctcctcacgtggtgatatggagcgcggtgactgcttcttgtgctttccctggtttgtttgaggctcaggagctgatggctaaagataggagtggggagatagtgccgtatcatccgccttttaatttggaaccggaggaaggtggtgataaagcgtctacgaggaggtggagagatgggagtttggaggttgatttgccgatgatgcagcttaaggagctgtttaatgttaatcattttattgtgagccaggctaatcctcacattgctccgttgctgcgtttgaaggatatagttagagcttatggtggtagattcgctgctaagcttgcgcatctagtggagatggaggtgaaacatagatgcaaccaagtactagagcttggctttccactcggtggactcgctaagctatttgctcaggagtgggaaggtgatgtaacagttgtgatgcctgctactcttgctcagtactctaagatcatacagaaccctacacacgtggagctacaaaaggcagctaaccaaggaaggagatgcacttgggagaagctctcagccatcaaagcaaactgcgggatcgagcttgcgcttgacgagtgcgtagccattctcaaccacatgcggaggctcaagagaagcgcagagagagcctccacagcttcctcgtctcatcacggattagcttcaacgacaagattcaatgcttctagaagaatcacgtcttggaacgtcatcgctagagagaactcaactggctcactggacgacctcgttactgacagtaacaataataatctccacgcggggaggaacctaagcgacagcgaaacggagagcgtggagatgagttcttggactaggactggtggaccgttgatgagaacggcttctgctaataggttcactgactttgtccatggtcttgacgtggacattgcgttgacaagagggtttactagcagccctaactctccagcggttcctggcccggttagtccgagttttagtccgagatcgagatccttggcggctcaatccgagagcgaatctgacaagagggaaagtagcaacagttcgagtataacagttagtgaaggtgatcttctacagcctgagagaacgagtaacggttttgttttaaacgttgttagaagagagaacttggggatgcctgtggggaaccagagcggtgagctgccggagagtgtacagatagatatacctgagagggagatggataatagctctgtctcagaacatgaagatgataatgatgatgatgatgatgaagaagaagaacataagggctcggttccggttaaagattccggtttacaagattcttgtagtgtaatagatgcttag

SEQ ID NO: 3 - protein, 822 aa, Brassica napus
MDISNEANVDPFSIGPTSILGRTIAFRVLFCKSMLQLRRDLFRFLLHWFLTLKLAVSPFVSWFHPRNPQGILAVVTIIAFVLKRYTNVKAKAEMAYRRKFWRNMMRAALTYEEWAHAAKMLDKETPKMNESDLYDEELVKNKLMELRHRRQEGSLRDIMFCMRADLVRNLGNMCNPELHKGRLQVPRHIKEYIDEVSTQLRMVCNNSESLEDLSLDEKLSFMHETRHAFGRTALLLSGGASLGAFHVGVVRTLVEHKLLPRIIAGSSVGSIICSVVASRSWPELQSFFENSLHSLQFFDQLGSVFTIVKRVMTQGALHDIRQLQCMLRNLTCNLTFQEAYDLTGRILGITVCSPRKHEPPRCLNYLTSPHVVIWSAVTASCAFPGLFEAQELMAKDRSGEIVPYHPPFNLEPEEGGDKASTRRWRDGSLEVDLPMMQLKELFNVNHFIVSQANPHIAPLLRLKDIVRAYGGRFAAKLAHLVEMEVKHRCNQVLELGFPLGGLAKLFAQEWEGDVTVVMPATLAQYSKIIQNPTHVELQKAANQGRRCTWEKLSAIKANCGIELALDECVAILNHMRRLKRSAERASTASSSHHGLASTTRFNASRRITSWNVIARENSTGSLDDLVTDSNNNNLHAGRNLSDSETESVEMSSWTRTGGPLMRTASANRFTDFVHGLDVDIALTRGFTSSPNSPAVPGPVSPSFSPRSRSLAAQSESESDKRESSNSSSITVSEGDLLQPERTSNGFVLNVVRRENLGMPVGNQSGELPESVQIDIPEREMDNSSVSEHEDDNDDDDDEEEEHKGSVPVKDSGLQDSCSVIDA

SEQ ID NO: 4 - DNA, 2469 bp, Brassica napus
  sdp1
  CDS (1)..(2469)
atggatataagcaacgaggccaatgtcgatcccttctcaatcggaccaacctccatcctcggccgaaccatcgccttccgagtcctcttctgcaaatcaatgctccagctccgccgcgacctcttccgcttcctcctccactggttcctcacactcaagctcgccgtctccccctttgtctcctggttccacccccggaacccccaggggatcctcgccgtcgtcacgatcatcgccttcgtcctgaaacgctacaccaacgtgaaggccaaggccgagatggcctaccgtagaaagttctggaggaacatgatgcgcgcggcgttgacttacgaggaatgggctcacgccgctaagatgttggataaagagactccgaagatgaacgaatccgatctttacgatgaagagttggttaagaacaagctaatggagcttcgtcatcgacgtcaagaaggctctctgagagacattatgttctgtatgagagctgatctcgtgaggaacctcgggaacatgtgtaaccctgagctgcacaaagggagactccaagttcctagacataacaaagagtatatagacgaagtctctactcagctgagaatggtatgcaacaactctgagtccttagaagacctttctttagatgagaagctttctttcatgcacgagacgcgtcacgcctttggtaggactgctttgctactaagtggcggggcctctctcggcgcgtttcatgtcggtgttgtcaggactcttgtcgagcataagcttttacctcggatcatcgccggctctagcgtcggctcaataatctgctccgtcgtggcgtcaagatcctggccagaactgcagagcttcttcgagaactcgttacactctctccagttctttgaccagctaggaagcgtcttcacgatcgtgaaacgcgtcatgacgcaaggagcgttgcacgacattagacagctgcagtgcatgcttaggaacctcacgtgcaacctcacgttccaagaggcttatgatctgacggggaggatactcgggataacggtttgctcaccgaggaagcacgagccgcctcggtgtcttaactatctcacttctcctcacgtggtgatatggagcgcggtgactgcttcttgcgctttccctggtttgtttgaagctcaggagctgatggctaaagataggagtggggagatagtgccgtatcatccgccttttaatttggaaccggaggaaggtggggataagtcgtctacgaggaggtggagagatgggagtttggaggttgatttgccgatgatgcagcttaaggagctgtttaatgttaatcattttattgtgagccaggctaatcctcacattgctccgttgctgcgtttgaaggatatagttagagcttatggtggtagattcgctgctaagcttgcgcatctagtggagatggaggtgaaacatagatgcaaccaagtactagagcttggctttccactcggtggactcgctaagctatttgctcaggagtgggaaggtgatgtaacagttgtgatgcctgctactcttgctcagtactctaagatcatacagaaccctacacacgtggagctacaaaaggcagctaaccaaggaaggagatgcacttgggagaagctctcagccatcaaagcaaactgcgggatcgagcttgcgcttgacgagtgcgtagccattctcaaccacatgcggaggctcaagagaagcgcagagagagcctccacagcttcctcgtctcatcacggattagcttcaacgacaagattcaatgcttctagaagaatcccgtcttggaacgtcatcgctagagagaactcaactggctcactggacgacctcgttactgacagtaacaataataatctccacgcggggaggaacctaagcgacagcgaaacggagatcgtggagatgagttcttggactaggactggtggaccgttgatgagaacggcttctgctaataggttcactgactttgtccatggtcttgacgtggacattacgttgacaagagggtttactagcagccctaactctccagcggttcctggcccggttagtccgagttttagtccgagatcgagatccttggcggctcaatccgagagcgaatctgacaagagggaaagtagcaacagttcgagtataacagttagtgaaggtgatcttctacagcctgagagaacgagtaacggttttgttttaaacgttgttagaagagagaacttggggatgcctgtggggaaccagagcggtgagctgccggagagtgtacagatagatatacctgagagggagatggataatagctctgtctcagaacatgaagatgataatgatgatgatgatgatgaagaagaagaacataagggctcggttccggttaaagattccggtttacaagattcttgtagtgtaatagatgcttag

SEQ ID NO: 5 - protein, 822 aa, Brassica napus
MDISNEANVDPFSIGPTSILGRTIAFRVLFCKSMLQLRRDLFRFLLHWFLTLKLAVSPFVSWFHPRNPQGILAVVTIIAFVLKRYTNVKAKAEMAYRRKFWRNMMRAALTYEEWAHAAKMLDKETPKMNESDLYDEELVKNKLMELRHRRQEGSLRDIMFCMRADLVRNLGNMCNPELHKGRLQVPRHNKEYIDEVSTQLRMVCNNSESLEDLSLDEKLSFMHETRHAFGRTALLLSGGASLGAFHVGVVRTLVEHKLLPRIIAGSSVGSIICSVVASRSWPELQSFFENSLHSLQFFDQLGSVFTIVKRVMTQGALHDIRQLQCMLRNLTCNLTFQEAYDLTGRILGITVCSPRKHEPPRCLNYLTSPHVVIWSAVTASCAFPGLFEAQELMAKDRSGEIVPYHPPFNLEPEEGGDKSSTRRWRDGSLEVDLPMMQLKELFNVNHFIVSQANPHIAPLLRLKDIVRAYGGRFAAKLAHLVEMEVKHRCNQVLELGFPLGGLAKLFAQEWEGDVTVVMPATLAQYSKIIQNPTHVELQKAANQGRRCTWEKLSAIKANCGIELALDECVAILNHMRRLKRSAERASTASSSHHGLASTTRFNASRRIPSWNVIARENSTGSLDDLVTDSNNNNLHAGRNLSDSETEIVEMSSWTRTGGPLMRTASANRFTDFVHGLDVDITLTRGFTSSPNSPAVPGPVSPSFSPRSRSLAAQSESESDKRESSNSSSITVSEGDLLQPERTSNGFVLNVVRRENLGMPVGNQSGELPESVQIDIPEREMDNSSVSEHEDDNDDDDDEEEEHKGSVPVKDSGLQDSCSVIDA

SEQ ID NO: 6 - DNA, 801 bp, Vernonia
gacaagcccgaattctgggattggacgtgggatgaaatcgcgggtcgtgacttgcctgccgttatcgcttatatattccaacaaactcgacagaagatccactacgtcggacattccctgggaactttgattgcattggcttctttttctgaagggaaacaaatagacaagatgaaatcggctgcgttattgagcccgattgcgtacttgagccatatgaccacagcgctcggggtagtggctgctaaagtcttcgttggtgagattactatagtatttggtctcgcggagttcaatccaaaaggcgaagatgtgagccggttcctcaaaagcctatgttccgatccaaaagttgattgttatgatttgatgactgccattacaggtaaaaactgttgcctcaatgcctcaactgtcgatgccttcttaagaaacgagcctcaatctacctcgactaagaacatggttcatttggctcaaaccgttagagatggggttttgactaaatacgactacggaaatcctgccttcaatttggaacattatggtgtaccaaggcctccgatctataacatttcgaacatcccaaaagacttcccgttgtatctttgttacggaggtcaagatgctctctcggaccccaaagacgtggctactttgcttgatgatcttaagcagcatgatgaagggaagatcagcgtgcaatatatcaaggactacgctcatgctgattttataatgggcgtaacggctaaagatgttgtgtatgacaaaattctctcgttttttcatcgaaaccaa

SEQ ID NO: 7 - DNA, 2329 bp, Glycine max
ccgggtcgacaagagggatctctcggagatataatgttttttatgcgtgccgatcttattagaaatttaggtaatatgtgtaaccctgaactacacaagggtaggcttcaggtgcctaaattaatcaaggagtacattgatgaagtaacgactcaattgagaatggtctgtgattctgattcagaggagctatcattggaagaaaagcttgctgacatgcatgaaacaaggcatgcatttgggaggactgctttgctgttaagtgggggtgcctctcttggagcttctcatgtgggtgtagttaaaacactggtagaacataaactcatgcctaggataattgctggttcaagtgtgggatccattatgtgtgctgttgttgccactaggacttggcctgagctccagagcttttttgaggattcatggcactcattgcaattttttgatcaaatgggtgggatttttgcagttgttaagagagtcacaacattgggtgctgttcatgagatcagacagttgcaaatgatgttgaggcatctaacaagcaatcttacatttcaagaagcttatgacatgacaggtagaattcttgggattacagtttgttccccaaggaagcatgaaccacctagatgtcttaactacttgacttcaccccatgtggttatatggagtgcagtaaccgcttcttgtgccttccctggcctttttgaggctcaagaattgatggcaaaggatagaagtggagagattattccttaccaccctccttttaacttaggtcctgaagagggctccacaccagcacgccgttggagggatggtagcttggagattgatttacctatgatgcagttgaaagaactattcaatgtcaatcattttatagttagtcaggccaaccctcatattgcaccattattgagattgaaagaatttgtgcgcacttatgggggcaactttgctgccaagcttgctcatcttgtggagatggaggtgaaacataggtgtcatcaaatactggaacttggttttccattaggtggacttgctaaattgtttgctcaagactgggaaggtgatgtgactgttgttattcccgcaactcttgctcagtacaccaaaattatacagaacccttcttatggagagcttcaaaaggcagccaaccaagggagaagatgtacctgggagaaactttcagccataaaagcaaattgtggcattgagcttgctcttgatgagtgtgttgtgattctcaatcatatgagaagactaaagagaattgctgagagagctgcttctgcctctcatggtttgtccagcactgtaaggttcagtgcttcaaaaagaattccttcatggaattgcattgcacgagagaattcaactggttcccttgaggaccttactgatgttgctgcctcaaagcatcaaggcattagcagttcctgtggaaccaatggcaaaacttggaagacctaccgtggcatacttgatggaagtgacagtgactctgaaagtgttgatttgcattcttggacaagatctggtgggcctttgatgagaactacttcagcaaatatgtttgtcgattttcttcaaaacttagacgttgataccgatcaaaacaataaaggcttagtgagtcgtgctaaccctaatgattttcagtatcgtagccccaggctcgcaacactggataggaactctgatagcacagaatctgagccaagggaaattggcaacagggttttcaatgtgtccagcatacttgtgaccgaaggtgatcttttgcagcctgaaaggatccataatgggattgtgtttaatgttgtcaagaaagaagacttgtcacccttaagtggtagcagtcatgattttgaaaattacaacattgaagttgctgaatgtgtccaagatgagtgtccagggaaggagatagatgctgctagctcagcttctgaacatggagatgatgaagaatccacagtagctaggtccttaactgaaactcaagactacaattccatggatcatcattcgggtatggatcagagcattgttgacagttagtttcaagtatcagttcttttccagtgacattttaatattttgttcctattgccctccatattgtaaatagtactcattctaggcttggaggagaatctctattcatgattttgatgggaataactcaccatttggtttactcttgtaactaagataaagtgattgtatacaaattccacgaccacacaactgctgtgtcagtgtgaaattacttgttaaatttttaaaaaaaaacaaagaaagacaaaag

SEQ ID NO: 8 - protein, 692 aa, Glycine max
PGRQEGSLGDIMFFMRADLIRNLGNMCNPELHKGRLQVPKLIKEYIDEVTTQLRMVCDSDSEELSLEEKLADMHETRHAFGRTALLLSGGASLGASHVGVVKTLVEHKLMPRIIAGSSVGSIMCAVVATRTWPELQSFFEDSWHSLQFFDQMGGIFAVVKRVTTLGAVHEIRQLQMMLRHLTSNLTFQEAYDMTGRILGITVCSPRKHEPPRCLNYLTSPHVVIWSAVTASCAFPGLFEAQELMAKDRSGEIIPYHPPFNLGPEEGSTPARRWRDGSLEIDLPMMQLKELFNVNHFIVSQANPHIAPLLRLKEFVRTYGGNFAAKLAHLVEMEVKHRCHQILELGFPLGGLAKLFAQDWEGDVTVVIPATLAQYTKIIQNPSYGELQKAANQGRRCTWEKLSAIKANCGIELALDECVVILNHMRRLKRIAERAASASHGLSSTVRFSASKRIPSWNCIARENSTGSLEDLTDVAASKHQGISSSCGTNGKTWKTYRGILDGSDSDSESVDLHSWTRSGGPLMRTTSANMFVDFLQNLDVDTDQNNKGLVSRANPNDFQYRSPRLATLDRNSDSTESEPREIGNRVFNVSSILVTEGDLLQPERIHNGIVFNVVKKEDLSPLSGSSHDFENYNIEVAECVQDECPGKEIDAASSASEHGDDEESTVARSLTETQDYNSMDHHSGMDQSIVDS

SEQ ID NO: 9 - DNA, 1026 bp, Brassica napus
  rdm1-like
ggtcgacgatttcgtcgagcttcaaaaagccgctaaccaaggaaggagatgcacttgggagaagctatcagccataaaagcaaactgtgggatcgagcttgcgcttgatgagtgtgtaactaatcttaaccatatgcgtaggctcaacagaagcgctgagagagccgctgctgctgctggcacgtcctcctcgtctcatcacggattagcttcaacgacaagattcaatgcttctagaagaatcccgtcttggaacgtcatcgctagagagaactcaactggctcactggacgacctcgtcactgacagtaacaataataatctccacgcggggaggaacctaagcgacagcgaaacggagagcgtggagatgagttcttggacgaggactggtggaccgttgatgagaacagcttctgctaataggttcactgactttgtccatggtcttgacgtggacattgcgttgacaagagggtttactagcagccctaactctccagcggttcctggcccggttagtccgagttttagtccaagatcgagatccttggcggctcaatccgagagcgaatctgacaagagggaaagtagcaacagttctagtatatcagctactgaaggtgatcttctgcagcctgagagaacgagtaacggttttgttttgaacgttgttagaagagagaacttggggatgcctgtggagaaccagagcggtgagctgccggagagtgtacagatagatatacctgagagggagatggataatagctctgtctcaggacatgaagatgataatgatgataatgatgatgaagaagaagaacataagggctcggttccggttaaagattccggtttacaagattcttgtagtgtaatagatgcttagactgatttgatccgagtgaagagattcttgttcagcaaagatcttggagtgttttagtgctttgtaaatagtacaactataggccgcaagtaaggtgcatgttgtgtatgtttgcagtgattatgttgaaaatt

SEQ ID NO: 10 - DNA, 638 bp, Brassica napus
  rdm1 like
tcccacgctcaggttctaattgcaaaaaaggatcatactttccttattaaaatcaatttcctgtgcttgatttctatcttaggaagctcgtagtagtttctctgatagtgaatttgatgaaacaaagaaaaaaatgctgacttggtctcagattctaattaaacacacacacacacataacctccaatggatataagcaacgaggccaatgtcgatcccttctcaatcggaccaacctccatcctcggccgaaccatcgccttcagagtcctcttctgcaaatcaatgctccagctccgccgcgacctcttccgcttcctcctccactggttcctcacactcaagctcgccgtctccccctttgtctcctggttccacccccggaacccccaggggatcctcgccgtcgtcacgatcatcgccttcgtcctgaaacgctacaccaacgtgaaggccaaggccgagatggcctaccgtagaaagttctggaggaacatgatgcgcgcggcgttgacttacgaggaatgggctcacgccgctaagatgttggataaagagactccgaagatgaacgagtccgatctttacgatgaagagttggttaagaacaagctaatggagcttcgtcatcgacgtca

SEQ ID NO: 11 - DNA, 2795 bp, Brassica napus
  rdm1-like
  CDS (187)..(2661)
tcccacgctcaggttctaattgcaaaaaaggatcatactttccttattaaaatcaatttcctgtgcttgatttctatcttaggaagctcgtagtagtttctctgatagtgaatttgatgaaacaaagaaaaaaatgctgacttggtctcagattctaattaaacacacacacacacataacctccaatggatataagcaacgaggccaatgtcgatcccttctcaatcggaccaacctccatcctcggccgaaccatcgccttcagagtcctcttctgcaaatcaatgctccagctccgccgcgacctcttccgcttcctcctccactggttcctcacactcaagctcgccgtctccccctttgtctcctggttccacccccggaacccccaggggatcctcgccgtcgtcacgatcatcgccttcgtcctgaaacgctacaccaacgtgaaggccaaggccgagatggcctaccgtagaaagttctggaggaacatgatgcgcgcggcgttgacttacgaggaatgggctcacgccgctaagatgttggataaagagactccgaagatgaacgagtccgatctttacgatgaagagttggttaagaacaagctaatggagcttcgtcatcgacgtcatgagggctctcttagagacattattttctgtatgagagctgatcttgtgagaaatctcggtaatatgtgtaaccctgagcttcacaagggaaggcttcacgtgccgagactcatcaaagagtatatcgatgaggtctctacacagcttaggatggtttgcgacatggacactgaagagctttctctggaggagaaactttcttttatgcatgagaccagacacgcgtatggaagaacagctctacttctcagtggaggagcttctcttggggctttccatcttggtgtggtcaagacgcttgtggaacataagctattgccaagaattatagctggttcaagcgtggggtctgtaatgtgtgcggttgtggggacaaggtcatggcccgagttgcagagcttctttgaagggtcctggcatgctctgcagttctttgatcagatgggaggaattttcactactgtgaagcgggttatgactcaaggcgcagtccatgagatccggcatctgcaatggaagttgaggaatctcaccaacaatctcacagtccggaatttccgggtcgacgacttcgaggatactcgggataacggtttgctcaccgacgaagcactagccgcctcggtgcttaactatctcacttctcctcacgtggtgatatggagcgcggtgactgcttcttgcgctttccctggtttgtttgaagctcaggagctgatggctaaagataggagtggggagatagtgccgtatcatccgccttttaatttggaaccggaggaaggtggggataagtcgtctacgaggaggtggagagatgggagtttggaggttgatttgccgatgatgcagcttaaggagctgtttaatgttaatcattttattgtgagccaggctaatcctcacattgctccgttgctgcgtttgaaggatatagttagagcttatggaggtcgatttgcagcaaagctcgcgcaactcgcggagatggaagtgaagcatagatgtaatcaagtactagaactcgggcttcctctaagagaagtagcttcactatttgctcaagaatgggaaggcgatgtcacaattgtcatgccagctactttttctcagtacttgaagatcatacaagtcgacgatttcgtcgagcttcaaaaagccgctaaccaaggaaggagatgcacttgggagaagctatcagccataaaagcaaactgtgggatcgagcttgcgcttgatgagtgtgtaactaatcttaaccatatgcgtaggctcaacagaagcgctgagagagccgctgctgctgctggcacgtcctcctcgtctcatcacggattagcttcaacgacaagattcaatgcttctagaagaatcccgtcttggaacgtcatcgctagagagaactcaactggctcactggacgacctcgtcactgacagtaacaataataatctccacgcggggaggaacctaagcgacagcgaaacggagagcgtggagatgagttcttggacgaggactggtggaccgttgatgagaacagcttctgctaataggttcactgactttgtccatggtcttgacgtggacattgcgttgacaagagggtttactagcagccctaactctccagcggttcctggcccggttagtccgagttttagtccaagatcgagatccttggcggctcaatccgagagcgaatctgacaagagggaaagtagcaacagttctagtatatcagctactgaaggtgatcttctgcagcctgagagaacgagtaacggttttgttttgaacgttgttagaagagagaacttggggatgcctgtggagaaccagagcggtgagctgccggagagtgtacagatagatatacctgagagggagatggataatagctctgtctcaggacatgaagatgataatgatgataatgatgatgaagaagaagaacataagggctcggttccggttaaagattccggtttacaagattcttgtagtgtaatagatgcttagactgatttgatccgagtgaagagattcttgttcagcaaagatcttggagtgttttagtgctttgtaaatagtacaactataggccgcaagtaaggtgcatgttgtgtatgtttgcagtgattatgttgaaaatt

SEQ ID NO: 12 - protein, 824 aa, Brassica napus
MDISNEANVDPFSIGPTSILGRTIAFRVLFCKSMLQLRRDLFRFLLHWFLTLKLAVSPFVSWFHPRNPQGILAVVTIIAFVLKRYTNVKAKAEMAYRRKFWRNMMRAALTYEEWAHAAKMLDKETPKMNESDLYDEELVKNKLMELRHRRHEGSLRDIIFCMRADLVRNLGNMCNPELHKGRLHVPRLIKEYIDEVSTQLRMVCDMDTEELSLEEKLSFMHETRHAYGRTALLLSGGASLGAFHLGVVKTLVEHKLLPRIIAGSSVGSVMCAVVGTRSWPELQSFFEGSWHALQFFDQMGGIFTTVKRVMTQGAVHEIRHLQWKLRNLTNNLTVRNFRVDDFEDTRDNGLLTDEALAASVLNYLTSPHVVIWSAVTASCAFPGLFEAQELMAKDRSGEIVPYHPPFNLEPEEGGDKSSTRRWRDGSLEVDLPMMQLKELFNVNHFIVSQANPHIAPLLRLKDIVRAYGGRFAAKLAQLAEMEVKHRCNQVLELGLPLREVASLFAQEWEGDVTIVMPATFSQYLKIIQVDDFVELQKAANQGRRCTWEKLSAIKANCGIELALDECVTNLNHMRRLNRSAERAAAAAGTSSSSHHGLASTTRFNASRRIPSWNVIARENSTGSLDDLVTDSNNNNLHAGRNLSDSETESVEMSSWTRTGGPLMRTASANRFTDFVHGLDVDIALTRGFTSSPNSPAVPGPVSPSFSPRSRSLAAQSESESDKRESSNSSSISATEGDLLQPERTSNGFVLNVVRRENLGMPVENQSGELPESVQIDIPEREMDNSSVSGHEDDNDDNDDEEEEHKGSVPVKDSGLQDSCSVIDA

SEQ ID NO: 13 - DNA, 403 bp, Brassica napus
  rdm1-like
gtccggaatttccgggtcgacgacttcgaggatactcgggataacggtttgctcaccgacgaagcactagccgcctcggtgcttaactatctcacttctcctcacgtggtgatatggagcgcggtgactgcttcttgcgctttccctggtttgtttgaagctcaggagctgatggctaaagataggagtggggagatagtgccgtatcatccgccttttaatttggaaccggaggaaggtggggataagtcgtctacgaggaggtggagagatgggagtttggaggttgatttgccgatgatgcagcttaaggagctgtttaatgttaatcattttattgtgagccaggctaatcctcacattgctccgttgctgcgtttgaaggatatagttagagcttatg

SEQ ID NO: 14 - DNA, 1478 bp, Brassica napus
  tgl1
  CDS (164)..(1333)
ggaaggaatgggtaaaagattacagcatgtgtatcaatgcatgaatcttatctctctttataacgagataagatctaataattcatgcctgaaatcttgcattatttagtggactaaaaggaatacaaggattttgcatcggagacacgactcgtatcttcccatggcttcttcactaaagaagctcatcacaagcattctacttttctttttctacaccattatcgtcgcctcatcagaaccatcgtgtcgcccttacaaatcgatcatcagcttcggtgattccatagccgacaccggaaactatctccatctctccgacgtcaaccatcctcctcaagccgcatttcttccttatggagaaaccttctttaatgctcccaccggacgtaactccgacggccgcctcatcatcgatttcatcgctgagttcttgggactaccgtatgtaccaccttactttggttcccaaaacgtgagcttcgagcaaggaatcaattttgctgtgtatggagcaaccgctttggatcgtgcgtttcttatagaaaaaggaattgtttctgattttaccaatgttagtttaagtgttcaacttaacactttcaagcagattttacctaccctatgtgcctcgtcttctcatgattgcagaaagatgcttgaagactcgctaatactcatgggagagattggagggaacgactataactaccccttcttcgaagacaaaagtatcaatgaaatcaaagagcttactcctctaattatcaaagctatttctgacgcaattgtggatttgatcgatttgggaggcaaaacatttctggtgcccggaagctttccaattggatgttccgcagcgtatcttactctatttcaaaccgcaaaagaaaaagaatatgatccttttacaggttgtctcccatggctcaacgaatttggaaagaaccatgatgaacagctcaagacagaactcaaacgactccgaaaactataccctcatgtcaacatcatttatgctgactactacaactctatgtaccggtttttccaagaaccagccaaatacgggtttaagaacagacctttggctgcttgttgtggagttggaggtcaatacaacttcactattggtgaagagtgtggatacgaaggagttgggtattgtcaaaatccgtctgagtatattaattgggacggttatcatttaaccgaagccgcacaccagaagatggctcatggcatactcaacggtccctatgcaactcctgcgttcaactggtcctgccttgacgctgcatcagtggataacgaatcttctttcggtagttgaaagtcatctgttcttcttcgtcagtgcaaattctttcagcattttttaaaaaacaaaccgtagtctataaatgccaaaacaaatagaccaaaaaaaaaatttacgtcataataacttaaactttttttaaaaaaaaaaaaaaaaa

SEQ ID NO: 15 - protein, 389 aa, Brassica napus
MASSLKKLITSILLFFFYTIIVASSEPSCRPYKSIISFGDSIADTGNYLHLSDVNHPPQAAFLPYGETFFNAPTGRNSDGRLIIDFIAEFLGLPYVPPYFGSQNVSFEQGINFAVYGATALDRAFLIEKGIVSDFTNVSLSVQLNTFKQILPTLCASSSHDCRKMLEDSLILMGEIGGNDYNYPFFEDKSINEIKELTPLIIKAISDAIVDLIDLGGKTFLVPGSFPIGCSAAYLTLFQTAKEKEYDPFTGCLPWLNEFGKNHDEQLKTELKRLRKLYPHVNIIYADYYNSMYRFFQEPAKYGFKNRPLAACCGVGGQYNFTIGEECGYEGVGYCQNPSEYINWDGYHLTEAAHQKMAHGILNGPYATPAFNWSCLDAASVDNESSFGS

SEQ ID NO: 16 - DNA, 752 bp, Linum usitatissimum
cgtgatacataaccttccgaccaatgttactttgagagctcagctggatttgttcagcaacctcctgccgtcgatgtgtggctccgacgacagttcaggatgaaatgagttgttgagcagctatctttttctaatgggagaaattggaggtaacgattataattacccactggacatgagaatgagcttggaacaagtacagcagctcgtccatatggtggtcgattctatcggtttggctatcaaggacataattgagttaggggcaatacacatattggttcctggaaatttcccaattggatgcttacccttcatgctaaccaacttccagagttcagacccagatgaatatgatccttccacaggctgcataacctggctcaaccagcttgctgaattccataacgaaatgctccaatctgaactggatcgcctccgaagacttcatccacatgccaatctaatctatgctgattactacactcccctaatgcgcatctatcgttctccggaacaattcggatttacaggtggagttctgaaagcatgttgtggaaagggaggaccttacaactacaatacatcaatcagctgtgggaacccactggtgaaagcttgtgaagaaccttccacttatgttaattgggatgggattcatttcactgaagctacttataggctggtggccaagtctattttggaacaagcatctttcactcttaatgcttcttcttcaccatctaattgta

SEQ ID NO: 17 - DNA, 1278 bp, Brassica napus
  CDS (91)..(1278)
aacgaaggtctcactctcgtttataaacgaagagggtaaggttgtaatcttacgttttaggataagaacagcccgtcgtctccggcgacgatgaagtggttacttgtcgccgtgttgaccgcttttacgatttcttccgccgtgacacaatctcatatcctccttggatctccggtcaactctctctgcgctgacctcattcatccggccggttactcctgcacggaacacactattcaaacgaaagatgggtacatactagctcttcaacgcgtggcttctcctgctcagaatctaacacttcagtatggtccgcctgttctgcttcagcacggtctatttatggctggagacgtgtggttcttggattcccctaaagagtcattaggcttcattcttgcagaccatgggttcgatgtttgggtaggtaacgttcgtggtacgcgctatagttatgggcatgtaactttctctgaaactgataaggaattttgggattggagttggcaagatttggctatgtatgacttggcagaaatggttcagtatatgtattcacttgcaaactccaaaatcttccttgttggacattctcaggggactatcatgtcttttgctgctcttactcagccacgtgttgcggaaatggttgaagcagccgcgttgctttgtccaatatcgtatttggatcatgtcacagctccacttgtagaaagaatggtttttatgcatctcgatcagatggtggttgctcttggcctgcatcaaataaactttcgaagtgagactttagttaaacttgttgactcgttatgcgaagggcatatggattgcactgatttcctctcgtccataacagggaagaattgttgtttcaatgactcgaggatagaatactatgtagattacgagcctcacccatcatctgtcaagaatattcgacatcttttccaaatgattcggaagggaacctttgcacaatacgactacgggtatttcaaaaatctacggacttatgggctgtcgaaacctccagaattcatactaagccacatcccggcatcattaccaatgtggatggggtatggtggaactgatggtttagcagatgtgacagatgtggaacatactctcgcggaactaccttccagtccagagttactatatcttgaggattatggtcacattgactttgtgcttggctcaagtgctaaagaagatgtctataagcacatgattcaatttttcagagcaaaggttaagtctagtagttggtaa

SEQ ID NO: 18 - protein, 395 aa, Brassica napus
MKWLLVAVLTAFTISSAVTQSHILLGSPVNSLCADLIHPAGYSCTEHTIQTKDGYILALQRVASPAQNLTLQYGPPVLLQHGLFMAGDVWFLDSPKESLGFILADHGFDVWVGNVRGTRYSYGHVTFSETDKEFWDWSWQDLAMYDLAEMVQYMYSLANSKIFLVGHSQGTIMSFAALTQPRVAEMVEAAALLCPISYLDHVTAPLVERMVFMHLDQMVVALGLHQINFRSETLVKLVDSLCEGHMDCTDFLSSITGKNCCFNDSRIEYYVDYEPHPSSVKNIRHLFQMIRKGTFAQYDYGYFKNLRTYGLSKPPEFILSHIPASLPMWMGYGGTDGLADVTDVEHTLAELPSSPELLYLEDYGHIDFVLGSSAKEDVYKHMIQFFRAKVKSSSW

SEQ ID NO: 19 - DNA, 911 bp, Brassica napus
aacgaaggtctcactctcgtttataaacgaagagggtaaggttgtaatcttacgttttaggataagaacagcccgtcgtctccggcgacgatgaagtggttacttgtcgccgtgttgaccgcttttacgatttcttccgccgtgacacaatctcatatcctccttggatctccggtcaactctctctgcgctgacctcattcatccggccggttactcctgcacggaacacactattcaaacgaaagatgggtacatactagctcttcaacgcgtggcttctcctgctcagaatctaacacttcagtatggtccgcctgttctgcttcagcacggtctatttatggctggagacgtgtggttcttggattcccctaaagagtcattaggcttcattcttgcagaccatgggttcgatgtttgggtaggtaacgttcgtggtacgcgctatagttatgggcatgtaactttctctgaaactgataaggaattttgggattggagttggcaagatttggctatgtatgacttggcagaaatggttcagtatatgtattcacttgcaaactccaaaatcttccttgttggacattctcaggggactatcatgtcttttgctgctcttactcagccacgtgttgcggaaatggttgaagcagccgcgttgctttgtccaatatcgtatttggatcatgtcacagctccacttgtagaaagaatggtttttatgcatctcgatcagatggtggttgctcttggcctgcatcaaataaactttcgaagtgagactttagttaaacttgttgactcgttatgcgaagggcatatggattgcactgatttcctctcgtccataacagggaagaattgttgtttcaatgactcgaggatagaatactatgtagattacga

SEQ ID NO: 20 - DNA, 2881 bp, Glycine max
  CDS (648)..(1955)
  misc_feature (2853)..(2853): n is a, g, c or t
ccgggatagttcttccgtcgctgcgcctcaagtgctcgtttgtaaaaatactcatcactggtgaatgatagcacatatctagttggctgaccgaaaccatgcatagttactacggagcacaatgtggagccatgaaacagatccaatcaagcttctcccaaaatggcaacaaaaatacatacaacggaactcatccaattacaatggttgcgagagctaacggaattgagtgtgtgcgaagcgactatgggtcctatgaggatgctgaataacagaaagaaaggacagcacaagaagttgtgttaacccataccgaatggatcatatctatacttaccaagactgttctagccattccatacgatagagcgaataggtcgcaataggggtagataacccccacgcgaccttattatggatggcccaaccagcattatatgattgggaataacatcacaacaggcgatgatgatgatgatgatgatcgccataaccctcgagccgctcgagccgattcggctcgagcgacacgagcgaggcagagagaataataaacaattaaaacagttgtgggttgtcagacacggtcttgcactcttatttggcagttctgaaaaggacgcgccgggagaggcgcgtggcagattatggatggtcgaacccgcaagcattatatgattggtgtggtgcgtgttgcatcagaggtggacgcaattcagaataacaataaagggtggatgaggatccagaggttcttggccacactggccataactgtctccatactcttgggaaatggaaaccccgttcagtgcttcgacggcggtagccaccaaaaacagcaacacagtttgtgtgaagagctcattatcccctacggttacccctgctccgagcatacgattcaaacgaaggatggtttcttgttaggtcttcaacgtgtctcttcttcttcttctcttcggcttcggaacgatggagaacgaggccctccggttctgcttctgcatggcttattcatggcaggtgatgcatggtttctaaatactccggaccaatcacttggcttcatacttgcagatcatggttttgatgtatgggtaggaaacgtgcgtggaacacggtggagccatgggcatatatctttattagagaagaaaaagcaattttgggattggagttggcaggaattagccctgtatgatgttgcagaaatgatcaattacattaattcagtaacaaactcaaagatatttgtagttgggcattcacaggggacaattatatcttttgctgccttcactcaaccggagatagtagaaaaggttgaggctgcagcccttctttctccaatatcatacttggatcatgtcagtgcacctcttgtacttagaatggttaagatgcacattgatgagatgattcttaccatgggcattcatcaactaaacttcaaaagcgaatggggggccagtctcttggtttccttatgtgatacccgcctaagttgcaacgacatgctttcatccataacaggtaagaattgttgcttcaacgagtcacgtgtggagttttatcttgagcaagaacctcacccatcatcctccaaaaacttgaaacaccttttccagatgatccgcaaaggtacctactccaagtatgattatggaaagctaaaaaatctgatagagtacggcaagttcaatccaccaaagttcgaccttagtcgcatacccaaatcattgcctctgtggatggcctatggtggaaatgatgctttggcagatataactgatttccagcacacactcaaggaattgccatccacaccggaagtggtttatcttgaaaactatggtcatgttgacttcattttaagcttgcaagcaaaacaagatctttatgaccctatgattagttttttcaagtcatccggaaaatttagtagtgtgtaaatttccttcattccggtatgatggatgcaatacaatggtctacgtgtttatatattactgcactttctgtaaagtgaaaatattaatattgtgtggagttcaccttgattttctgtatgtaaatatgatgacagatataataaagagtggcgttgcatggcctatttctgcaaaatatctttatgaccctaagattagttttttcaagtcatccggaaaatttagtagtatgtaatgtttgcttccttcgcttcattatctttgatttgggtagcccttaatgacactttctctgtgtcccactagtaaccataatttaatgttgttgctcttatgaatacttatttgttatcatcaaagattttcctcagatcatgtctgataatgatcacaacatttgcatgatgtgtagcagctaactggcctctgaagggacaggagaagaaatattggaaaataaatctgaaatctgaagacaatgttctattgtgtctacattagccaggggaaatgaatttgataatttgtctaaatgtcaaccttaattcttgtttgtttatttttgtggttgataatattgttaacctcttcatttagtgcttggcagcatgcatcgaaataatgcttgttagttgttactaatatgtttccaagagtaggatgatttcctcaaatgggctagtagtatttacaatcttgcaagtagattagctaaagcaagttcggctatattttcttcctttgttggtaatgcatattttgttaccagcatacgatatgtggttatgatgtttatgacatgctgtatcttgccaaagaccacacatctgtacaaagattagcactggctagcaactgtcatagtgccatcacttcttggctggtggcgaaccagcanatgggtgcactgaaatgcttttatttat

SEQ ID NO: 21 - protein, 435 aa, Glycine max
MDGRTRKHYMIGVVRVASEVDAIQNNNKGWMRIQRFLATLAITVSILLGNGNPVQCFDGGSHQKQQHSLCEELIIPYGYPCSEHTIQTKDGFLLGLQRVSSSSSLRLRNDGERGPPVLLLHGLFMAGDAWFLNTPDQSLGFILADHGFDVWVGNVRGTRWSHGHISLLEKKKQFWDWSWQELALYDVAEMINYINSVTNSKIFVVGHSQGTIISFAAFTQPEIVEKVEAAALLSPISYLDHVSAPLVLRMVKMHIDEMILTMGIHQLNFKSEWGASLLVSLCDTRLSCNDMLSSITGKNCCFNESRVEFYLEQEPHPSSSKNLKHLFQMIRKGTYSKYDYGKLKNLIEYGKFNPPKFDLSRIPKSLPLWMAYGGNDALADITDFQHTLKELPSTPEVVYLENYGHVDFILSLQAKQDLYDPMISFFKSSGKFSSV

SEQ ID NO: 22 - DNA, 1402 bp, Glycine max
tcagctacgtaggccccccccccccaatgtaccaggaaacagaacatggccaacacatcactctcaacaatccttgtgattctcttctggggtttaactcttgcaactgggagaaaattatcaccacttagcactaccgctacattgtcatcaccccccagtgatggtatttgctcatcaatggtgatgacacaaggctacacttgtggagaacacttggtgacatcacaagatggttatattcttaacttggcaagaattagaatgggagaatcaagggggccaccggttcttctacagcatggacttttcatggatggcataacatggttattgttaccttcaaaccagtctcttgcattccttttggcggataatgggtttgatgtttgggttgctaacactcgtggaaccaaatttagccggcaacatacatctttaccttctaatagctcggattattggaattggtcatgggatgaattagttgcacatgatcttccagccacattcaagtatgtgcatgatctaactggaaaaaaattgcactatgttggtcactcacagggaactttgattgcattggctgctctttcccaagatcagttactgaacatgttgagatcagctgccttacttagcccaattgcttatgctggtcagatgacttcacccctagctaaaaatgctgctgaaaactttattgcagagtcactgtacaatttgggaatctttgaatttaatatgagagggggctctgttattaagtttctaaaggacttgtgcaataacacaggcattgactgcaccaacttgttgacctctttcacaggccaaaactgctgcctgaacccttcgattgtaaatgtttttttggatcatgagcctcagtcaacagcaacaaagaacatgatccatctatctcagatgatcagagaaggaaccacttcaatgtttgattacgaaaaccgagatgagaacatgaaacactatggacaacccactcctccagcatatgacatgaaaagacttccaaatgaccttcctctcttcctgagttatggaggggctgatgctctttctgatgttaaggatgtgcaacgtctgttagaaatcctcaaagatcacgatgcagataagctagtagtgcagtacagaaatgattatgcacatgcagattatgttatgggtgaaaatgctcaccgagatgtatatgaacctcttatatctttctttaggcttcagtgatatctagtgaagaatactccttatagaatattgccattacctgtctctaaatcatagaattgaatagcacggaaatgtcagtatgtaatttcacagaagatgatattattaaaggaaattcctatatcttacttttatcaaaaaaaaaaaaaaa

SEQ ID NO: 23 - protein, 419 aa, Glycine max
  misc_feature (401)..(401): Xaa can be any naturally occurring amino acid
MANTSLSTILVILFWGLTLATGRKLSPLSTTATLSSPPSDGICSSMVMTQGYTCGEHLVTSQDGYILNLARIRMGESRGPPVLLQHGLFMDGITWLLLPSNQSLAFLLADNGFDVWVANTRGTKFSRQHTSLPSNSSDYWNWSWDELVAHDLPATFKYVHDLTGKKLHYVGHSQGTLIALAALSQDQLLNMLRSAALLSPIAYAGQMTSPLAKNAAENFIAESLYNLGIFEFNMRGGSVIKFLKDLCNNTGIDCTNLLTSFTGQNCCLNPSIVNVFLDHEPQSTATKNMIHLSQMIREGTTSMFDYENRDENMKHYGQPTPPAYDMKRLPNDLPLFLSYGGADALSDVKDVQRLLEILKDHDADKLVVQYRNDYAHADYVMGENAHRDVYEPLISFFRLQXYLVKNTPYRILPLPVSKS

SEQ ID NO: 24 - DNA, 696 bp, Helianthus annuus
agtggagacatccagattctgaagcaatcatgttccacaagtagaagttattggtgaatccaactaccctctgacctcatgcctctgtttccactccactaatcctatgtcgacatccgttctacaacatccgttactattggcggtcgccgtatcgctctgcgactactccgccgtgtgtttgcccggagacttgatcatccaacacagccaggcttacgacgacgctttgtgcctcaatcttgtcgaaccttggagttataactgcgtagaacacacgactgaaacaaatgatgggctcttgctaggtcttcaacacgtgtcatcaagcattgttaattcggctgcagaaaaagcacctcctgttttactcctacatggactctttatgggcggcgacgcttggattatggattcccctaatcaatcattgagacttattcttgcggactgtggtttcgatgtttgggttggaaacgtgcgtggaacaaaatggagtcatgggcattcatctttatcagacggagacaaggaattttgggattggagttggcaagagatggctctttatgatcttgaaggaatgctttcttatataaattccaaaaccgactcccaaggtttcggtgtaggacattcacaggggaacgataatgtccggtggctgctcttactcaaacggacattggtaatatg

SEQ ID NO: 25 - DNA, 615 bp, Linum usitatissimum
  misc_feature (576)..(576): n is a, g, c or t
cagaaaaccagaggagctccaagctcatcgcgccatttccaaaattccgcacgatgacgaagctgctactcttcctcctcacatcgatcctcctggtcaccgcatccgctgccgccggcgacgaagcggtaactctccagctgcgaacgccgaaggtaacttgtgcggccaagtcatcggacgagctggatacccttgcaccgaacacactattgaaactacagatggatacttgttagctctacagagggtttcctctaggaatgggaatataagctcgattcgtggtcctcctgtcttgcttcaacatggactcttcatgggaggcgattgctggtttctgaattcccccgaggagtcgctaggcttcatccttgcagaccagggtttcgatgtatgggttggaaatgttcgtgggacattctggagtcacgggcatgtatctttatctgaggacgacaaggacttctgggattggagttgggcaggaattggcaatgtatgacctagcagcgatgatacaccacatttattcagcaacaagctcaaaagttttcctcgttggtcattctcagngaacgatcatggctttagcggctctctcgcagccgaaaa

SEQ ID NO: 26 - protein, 114 aa, Linum usitatissimum
LCGQVIGRAGYPCTEHTIETTDGYLLALQRVSSRNGNISSIRGPPVLLQHGLFMGGDCWFLNSPEESLGFILADQGFDVWVGNVRGTFWSHGHVSLSEDDKDFWDWSWAGIGNV

SEQ ID NO: 27 - DNA, 751 bp, Brassica napus
atgttgtcaataatggcatctaaaatcgcttatgagaacaaatctttcatcacttccgtagtaaagaacacttggaagatggacttcgtgagttactacgactgttacaacgcgttccaaaaaaaaaacctgacacaagccttcgtgttcaaagcatcgaacacaaatccaaacctcatcgtcgtcagcttcagaggaaccgaacctttcaacgctgatgattggtgcactgatctagacatctcttggtacgaattgaaaaacgttggaaaagttcacgcagggttctcgaaagctctaggcctccaaaaaaacggatggcccaaagaaaatataactctaagacaccaatatgcgtactacacaattagacagaaacttagggacatgcttgcaaaaaacaagaccttaagtttattcaacgggtcacagccttggtggggcactagccgctctttttccggcagtactggcgattcacggtgaggatgagttgctagataaactagagggagtctacacatttggacagccacgcataggggatgaggtgtttggggagtttatgaaggaagtggtgagaaagcatggaatagagtatgagaggtttgtttataacaacgatattgtgcctagaataccctttgatgacaaggttttattctcgttcaagcactacggatcttgcaattacttcaatagtctctacaaaggaaaggtaagggaagatgcaccaaatgaaaattacttc

SEQ ID NO: 28 - DNA, 1729 bp, Brassica napus
  CDS (82)..(1515)
atttccgggtcgacgatctcgtaccatactcacttcttgtttcgtatatctgagcaaagtttctcttttcatattttgcaaatgtccgagacaaatatgaaattctgcaatagctattttctggtcgatccgaccaaagcaagtcttcttgatctccttctccttttatttttcccaaacctgaccaacaaaagattcatagattctacaccagacacgctcaaaaccgtccggacaactttcgcaactcgatggatcattgcgttagccgttttgattcaaaaaatattaatactcgtaagaaaacccatggcatccataggacgtttgctcacctattggcccaatcttcttacggaaaatggaggcttcttcaagttgatacttcatcttgtgacaggaaaactggtaaagcctgaggaatcgtcaaccacatatacgtcatttataggatgcacagatcgaagagtagagctggacaagaaaataaatgttgctaccatcgaatacaagtcgatgttgtcaataatggcatctaaaatcgcttatgagaacaaatctttcatcacttccgtagtaaagaacacttggaagatggacttcgtgagttactacgacttttacaacgcgttccaaaatagaaacctgacgcaagccttcgtgttcaaggcatcgagtacaaatccaaatcttatcgtcgttagcttcagaggaaccgagcctttcgacgttgatgattggtgcactgatctagacatctcttggtacgagttgaaaaacgttggaaaagttcatgcagggttctctaaagctctaggcctccaaaaaaacggatggcccaaagaaattatacctctaggacaccaatatgcgtactacacaattagacagaagcttagggacatgtttgcaaaaaacaagacctctaagtttattctaacgggtcacagccttggtggggcactagccgctctttttccggcagtactggcgattcacggtgaggatgagttgctagataaactagagggagtctacacatttggacagccacgcataggggatgaggtgtttggggagtttatgaaggaagtggtgagaaagcatggaatagagtatgagaggtttgtttacaacaacgatatcgtgcctagaatacccttcgatgacaagattttattctcatacaagcactacggatcttgcaattacttcaacagtctctacaaaggaaaggtaaaggaagatgcaccaaatgaaaactacatcaacttgctgtggctaataccgaagatgttaaatggtgcgtgggagttcataaggagtttcataatacagttctggaaaggcaaagactacaaagagaattggatgatgagatcgattaggattgtcggaataatactccctggtacctctaatcatctcccatatgattacgtcaactccacgcgcttgggaggattgtctcgatcatttactactccagaggataaactttcccttattgcttaaaagttaaaactcaaagctgttggataagcttgaataagacttgagttgcaagtttcctatttatgttgtgtttatctataagagaataggaaatatctagttgtgttaatcctaatgaggttaggataaataaagagttatataaggagatgctggtgtatagcataacttaataagtttgtgagtttgaggttttgagatagtttacgcaaga

SEQ ID NO: 29 - protein, 477 aa, Brassica napus
MSETNMKFCNSYFLVDPTKASLLDLLLLLFFPNLTNKRFIDSTPDTLKTVRTTFATRWIIALAVLIQKILILVRKPMASIGRLLTYWPNLLTENGGFFKLILHLVTGKLVKPEESSTTYTSFIGCTDRRVELDKKINVATIEYKSMLSIMASKIAYENKSFITSVVKNTWKMDFVSYYDFYNAFQNRNLTQAFVFKASSTNPNLIVVSFRGTEPFDVDDWCTDLDISWYELKNVGKVHAGFSKALGLQKNGWPKEIIPLGHQYAYYTIRQKLRDMFAKNKTSKFILTGHSLGGALAALFPAVLAIHGEDELLDKLEGVYTFGQPRIGDEVFGEFMKEVVRKHGIEYERFVYNNDIVPRIPFDDKILFSYKHYGSCNYFNSLYKGKVKEDAPNENYINLLWLIPKMLNGAWEFIRSFIIQFWKGKDYKENWMMRSIRIVGIILPGTSNHLPYDYVNSTRLGGLSRSFTTPEDKLSLIA

SEQ ID NO: 30 - DNA, 1892 bp, Glycine max
  CDS (105)..(1538)
agcgtggtcgcggccgaggtacgcgggggtatcagttttgtcccttgctcttgttctctgattggcctagccagtagtagccaatttgttggagctggttgggaatggcgtcgaaaccgaaatcaaatggaaattccaaatgcaacaaaggattcgctgacagctatatgctgttgaatcctgaagacgctcatttcttcgatcttgttcatgtgctgtattcccgtaacttgggaaaccgaaaatttgtggacagcaatgctgagggatcttatgagggaagcttccgccaaagatggcttatattcgtctctgtggtgctccagaagcttctgttgctcatcgctaagccactttcgttctttggctcttgcgttgagttcttcatcaacctccttgtcctcaacggtggcttcatcatgatcgttattaacttcctcacaggtcacctggtcgtccccgatcgtaatgcaccaaattatttgtcttgcatcggaaatttggacgcgagagtaaagttggatgccatcacgcgtgatgactgcaggtactatgtttcattagctatgatggcttcaaaggcatcctatgagaatgcagcttaccttaaatctctaataaaaaaccactggaagatggaattcgtgagattttttgattgctggaatgattttcaagaaaaggccacaacccaagtcttgattgttttggacaagcatgagaaccgcgatacttatgtggtagctttccgaggaacggaaccctttgatgcagatgcatggtgcactgaccttgacatctcatggtacgggattcccggcattggaaaaatgcatggtggcttcatgaaagccttagggctacagaaaaatgtggggtggcctaaggagattcaaagggatgaaaatcttcccccgttggcctactatgttattagggacattctaaggaaaggtttgagtgaaaatcctaatgcaaagtttatcattacgggtcatagtttgggtggagcactcgcaatcttgtaccctacgatcatgttcttgcatgatgagaagttgctgattgagaggttggaagggatctacacgtttgggcaaccaagagttggagatgaagcatatgcacagtatatgagacaaaaattgagggaaaattctatcaggtattgcaggtttgtttattgcaatgacatagttccgaggttgccctatgatgataaggacttgctcttcaagcactttgggatctgccttttctttaacaggcgctatgaactcaggattctcgaagaagagccgaataagaactatttctcgccatggtgtgtgatacccatgatgttcaatgctgttttggaactaataaggagctttaccatagcgtacaaaaatggacctcactatagagaaggatggtttctctttagtttcaggttggttggtctgctgattcctggcttacctgctcacggtccacaagattatattaattccactcttctgggatcaattgaaaaacattttaaagcagattgatgtgtccgtatacatgatcattccataccactacgtacatgtgtatggtcatgcagactaaaatttacataatcaagatttttagttttagaaaaaatggtaataacacttgattatgtatcatgtgaagaatagttatgtatcataatgatcatgaataatataacagtttgtcgtcagtacgagttattgtatagtaattaataagctaggtttaaagttgtttcctttggtgcatggatttatcattaatgagatcaatgtgaagtttgtttattaaaaaaaaaaaaaaaagtctctctctctctctctctctctctctctctctctctctctctctctctctctctctct

SEQ ID NO: 31 - protein, 477 aa, Glycine max
MASKPKSNGNSKCNKGFADSYMLLNPEDAHFFDLVHVLYSRNLGNRKFVDSNAEGSYEGSFRQRWLIFVSVVLQKLLLLIAKPLSFFGSCVEFFINLLVLNGGFIMIVINFLTGHLVVPDRNAPNYLSCIGNLDARVKLDAITRDDCRYYVSLAMMASKASYENAAYLKSLIKNHWKMEFVRFFDCWNDFQEKATTQVLIVLDKHENRDTYVVAFRGTEPFDADAWCTDLDISWYGIPGIGKMHGGFMKALGLQKNVGWPKEIQRDENLPPLAYYVIRDILRKGLSENPNAKFIITGHSLGGALAILYPTIMFLHDEKLLIERLEGIYTFGQPRVGDEAYAQYMRQKLRENSIRYCRFVYCNDIVPRLPYDDKDLLFKHFGICLFFNRRYELRILEEEPNKNYFSPWCVIPMMFNAVLELIRSFTIAYKNGPHYREGWFLFSFRLVGLLIPGLPAHGPQDYINSTLLGSIEKHFKAD

SEQ ID NO: 32 - DNA, 567 bp, Helianthus annuus
attcggccattatggcctcgcaacgggactgaattgctatcgaagctcgaaggggtgtacacatttggacaacctagagttggagatcataaatttggtgaattcatgaaagatgtgttggtaactcatggtttgaggtaccggaggtttgtttattgcaacgatttggtgccgagagtgccctttgatgattcggatgtctactttaagcattttggtgactgtcattattacaatagcttctacgagggtcaggtgctccccgaagaaccaaataagaactacttctccatgtttgctttgattcccatgtttataaatgcaccttgggagttgttgaggagctttatcatgtattatcataatggaccagaatactatgaaacctatacttgcagaggttgtagattgatcggacttttgatcgcaggattgccagctcacggtccaacagattacgttaatcttactaggcttggttcacctgaactcttcatggcctcattcctcaattaatcaacttacggggtcccataaggggaaacttattaagcgtaacatatttgc

SEQ ID NO: 33 - DNA, 870 bp, Brassica napus
  CDS (1)..(870)
atggaggattttagggtaagacacgagttttcatctaccactagtgtttcgttggattcaagatacgtcaaggcagcgcggtgccttttagaagaagttatcgacatgggtggtagacaggttgatctttgcaacgacgttcttatccaacaactgtttccaggaagaagaagacccggttttggcttgtcctctgagatcaaatctgaactttgtaactcaggtttcatgtctttgcctgagaatcatgagcttcatatcaaaatcaccaagcttctaagtttgttgcaacaggtagatgagaggtttgacatatactgcaatcaactggagcaagtgatatcatcatttgaggaagtagcaggagaaggagcctccaaattatacaccggtttagcacttcaagccatgactcgacattttggttctctccaagaagctatcctctctcagctcaactctcttcgtaggagattcataatctctcaagattttgttcccaagatcgtgacctctggtttgtcacagctcagcttgttcgatgggaacactccatcatcgcttcaacgtctcggttgggttcagggacctcagagacatgcttggaaacccatcagaggcttgcctgaaacttctgttgcgatcctcagagcttggctctttcaccatttcctgcatccttatccgagtgatgcagagaagctgatgttggcgtctcaaacagggctttcaaagaaccaagtatcaaactggttcataaatgctcgagttcgactctggaaaccaatgatagaagagatgtacagggaagagtttggagactcctcagatgaatccatgcaaagagaaggcaatgatgattcaaactaa

SEQ ID NO: 34 - protein, 289 aa, Brassica napus
MEDFRVRHEFSSTTSVSLDSRYVKAARCLLEEVIDMGGRQVDLCNDVLIQQLFPGRRRPGFGLSSEIKSELCNSGFMSLPENHELHIKITKLLSLLQQVDERFDIYCNQLEQVISSFEEVAGEGASKLYTGLALQAMTRHFGSLQEAILSQLNSLRRRFIISQDFVPKIVTSGLSQLSLFDGNTPSSLQRLGWVQGPQRHAWKPIRGLPETSVAILRAWLFHHFLHPYPSDAEKLMLASQTGLSKNQVSNWFINARVRLWKPMIEEMYREEFGDSSDESMQREGNDDSN

SEQ ID NO: 35 - DNA, 1506 bp, Glycine max
  CDS (46)..(1500)
tgcgtgtcggtctctctctctcccggcaccagtttctcttcacttatgactgcttgtgtcccaaatttaaagggaacttcatctcttaaagatgatgaggccagcttacaaagggaattgagaaatgctgagtgcatggcatctttagcttcttctggtggctttcacaaaagggatggtttgtataatccacaacacccctcaatgtgccttggtgaaggccaaagtcatggatcacaaggtttttccaacaatatgttgaactcacaatacctcaaggcagcacaggagttgcttgatgaaatagttaatgtccgaaagcaaaccagtttggaaaagcaacagagtttccgtgatattggtttagatggctccaaagattcagatggaaaatctaccagccaatccgtgcagatatcttcaggccccaatggttcttctgctgcaaactcttcatgtgagctatcacctacagaacgacagaatttgttggacaaaaagacaaagcttttgtcaatgctggatgaggtggataaaagatacagacagtactgccaccaaatgcagattgtggtgtcatcttttgatatggttgctggatgtggagcagctgaaccatacactgcacttgccttgcgcacaatatcgcgccactttcggtgtttgcatgatgccattagcggccaaattcaagtgactcaaaggaaccttggagaacaagagggaatacctcgtctccgctatgttgatcagcagcttcggcaacaaaaggcccttcagcaacttggtgtaatgcgacaagcttggaggcctcagaggggacttcctgaaacctctgtttcaatactccgtgcatggctctttgagcacttccttcatccttatcctaaggattcagagaaaattatgctagcaaggcaaactggcttaacaaaaaaccaggtggcaaattggttcattaatgcaagggtgcgtctttggaagccaatggttgaggaaatgtacaaagaagaatttgatgttcaagcttctgacaataaaagggaagagtcacaggacaacttaataacagttgatgatagtgttcagcatcatgggctgaagttggatcatgccgacagaggaatccaaagcagtgatcatggagaaaatgccatggatcctagaattggaaaattgcaaggtgatcaaaggttcaacatgaacaacaacaatagtccttattatggtgatggctgcataatggcttctactccggccacatatgatttatcagagttaggtaacattgccgttggtggccacgtgtctctcgcattggaattgaggaactgtgaaagcgaaggatttggtgtgtcgaatgatgacatgcataaacgacgtaagaaaacattggcttcttccccagaggctgatttgctagattaccatttcacagacacaggaaagcaacaaaacaagtttggcaatcctcacctattgcacgagtttgttgtgtgaataaag

SEQ ID NO: 36 - protein, 484 aa, Glycine max
MTACVPNLKGTSSLKDDEASLQRELRNAECMASLASSGGFHKRDGLYNPQHPSMCLGEGQSHGSQGFSNNMLNSQYLKAAQELLDEIVNVRKQTSLEKQQSFRDIGLDGSKDSDGKSTSQSVQISSGPNGSSAANSSCELSPTERQNLLDKKTKLLSMLDEVDKRYRQYCHQMQIVVSSFDMVAGCGAAEPYTALALRTISRHFRCLHDAISGQIQVTQRNLGEQEGIPRLRYVDQQLRQQKALQQLGVMRQAWRPQRGLPETSVSILRAWLFEHFLHPYPKDSEKIMLARQTGLTKNQVANWFINARVRLWKPMVEEMYKEEFDVQASDNKREESQDNLITVDDSVQHHGLKLDHADRGIQSSDHGENAMDPRIGKLQGDQRFNMNNNNSPYYGDGCIMASTPATYDLSELGNIAVGGHVSLALELRNCESEGFGVSNDDMHKRRKKTLASSPEADLLDYHFTDTGKQQNKFGNPHLLHEFVV

SEQ ID NO: 37 - DNA, 822 bp, Helianthus annuus
aaaaatttaaaggtggagcaaagatacaaacaataccatcaacaaatgcaaatagtaatatcatggtttgaacaagcagccggaaccggggcagcaaaaacatacacagcactcgctttacagacaatctcgaagcaatttcgatgcctgaaagacgcgataatgggccagattaaagccgcaagccgcagcttaggggaagaagacagtttaaccggcggtggtaagcccgatggcagcggttcgaggctgaaatttgtggataatcaactcaggcaacagagagctttgcagcaattgggtatgatccagcataatgcttggagaccccaaagaggattgcctgagcggtctgtttcggttcttcgcgcttggcttttcgagcattttcttcacccatatccaaaggattcagacaaacgcatgcttgcagaaacaagctgggcttactagaagtcaggtggcgaattggtttataaacgctcgtgttcggctatggaagccgatggtggaggagatgtacctcgaggaaattaaagaacacgaacaaaacggaaaagacgacactaacacgagcaagaacgacgaaaacgaagataactcgtcgtcgaaacaagggaaaactccgtcgccagaaaactcaaacagaggattccgaaccgcgaaacaagagaatgcgttccacccaccaccgtcactgacggcttccaccagcgtctcgacatctccaaccggaattcaattccaaaacccgtccggtttcagtctcatcgatgggatcacacaattcagcccgaaaaaaccacgaaacaacgagcagca

SEQ ID NO: 38 - DNA, 544 bp, Linum usitatissimum
gacgacgacgacgatgatacttcttcctcctcctccagaagagataaagccgtctcctggttccctatagtgagtcgaattacagaagcgcaagactaagctctactccctactcgaagaggtggataggaagtacaggcactactgcgagcaaatgaaggcggtggtgtcgtcgttcgagtcggtggccggagcgggggctgcgggggtatactcggtgttggcgtcaaaggcaatgtcgaggcacttcaggtgtctgagagacggaatcgtggcgcaaatccaggcgacgaggaagacgatgggggagaaagatccagtggctccggggacgacgagaggggaaacgccgaggttgaaggtgatagaccagacgataaggcagcacaaggcgttccagcagatgaacatgatggagtctcatccttggcgcccccagcgtggcctccctgagagatccgtctccgtcctccgcgcctggctcttcgagcatttcctccatccgtacccaagtgatgttgataaacatatcttagcacgccaa

SEQ ID NO: 39 - DNA, 2008 bp, Brassica napus
atgaacgccgccgtgtttacttcttctgctttatctctacccatatccttctgtaagactagatcatctcaactcaccagaaagaagggagtgaaaggagagttcagggtttttgctgtgtttggggaagatagtggattagttgagaagaagagtcaatgggggcatttgtttgatgtggaggatcccagatcgaaaactcctccttataaaggcaagttcatggatgtaaaccaagctcttgaagttgctaggttcgatatccaatatttggattggcgtgctcgtcaagatcttcttaccatcatgctccttcacgacaaggtcgttgatgtactgaatcctctagctcgtgagtacaagtctattggtactgtgaagaaagaactagctggattgcaggaggaactagcgaaagcacaccaacaggttcatatatcagaagcaagggtttcaactgctttagagaagttagctcacatggaagaattggttaatgataggttgttaccagatagagttgcgacagaatcagacagaccttcgtattcaacctctgtccaggacttagacagggaaaagacaaacattggtgggaaaagcttgaatgtttctggtccggttcagccgtatagtccacacttgaagaacttttggtatcccgttgctttcactgcagatcttaagcatgacacgatggtaccaattgactgctttgagcaaccatgggtcatctttagaggagaagatgggaaaccaggatgtgtacggaacacatgtgcacatagagcgtgtcctcttgatctcggctcggtgaacaatggtcgtatccaatgcccttaccacggatgggaatactcaactgatggaaagtgtacgaagatgccatctacaaagctactgaatgtgaagataaaatcgataccttgtcttgaacaagacggtatggtctgggtttggcccggtgatgagccaccttcacctacacttccttgtttacaacctccatcagggtttgtaatccatgccgagcttgtaatggacctaccggtggaacacgggttgctactagataatctcttggatcttgcgcatgctccattcactcacacatctacttttgcaaaaggctggagtgtcccaagcctggtaaagttcttaacaccatcttcaggtcttcaaggatactgggatccgtatccaatcgatatggagtttaaaccaccttgtatcgtgttatcgacaataggaatctcaaaacctgggaagctagaaggaaagagcactgagcagtgtgcaacacatcttcatcaactccatgtttgtttaccttcttcaagaaacaagacaagacttctataccgaatgtcactagactttgctccaatattgaagaatcttccattcatggaacatctctggagacatttcgctgagcaggtcttaaatgaagatctacggttggttttgggacagcaagaaaggatgttgaatggtgcaaatatatggaacttacctgttgcttatgacaagcttggagttcggtatagactatggaggaacgctgtagatcgtggtgatgataaattacctttctcaggctaattcttgttgaagaagaaatctaatgctcgagttgacgtggaaaggaaacttttagcagctgacattcaacagcgagcgaccttacaagaaagtgttggggtgcgttctctctgcatgtctgagtaaacgattatggagtttggtggattcatctttggagacgatgaaacaataacaaatatccattgtaaatcaataaggatatatatatttgttcacttaagtcgtaacttgttattcattttttgtcctgtgtacagttgattcactattgagtaattgaatatcagacatcagaaaactgcaaagaaaaaaaaaaaaaaaaaaaaaaaaaaagggggggcccggtacccaattcgccctatagtgagtcgtattacaattcactggccgtcgttttaca

SEQ ID NO: 40 - DNA, 1605 bp, Brassica napus
  CDS (1)..(1605)
atgaacgccgccgtgtttacttcttctgctttatctctacccatatccttctgtaagactagatcatctcaactcaccagaaagaagggagtgaaaggagagttcagggtttttgctgtgtttggggaagatagtggattagttgagaagaagagtcaatgggggcatttgtttgatgtggaggatcccagatcgaaaactcctccttataaaggcaagttcatggatgtaaaccaagctcttgaagttgctaggttcgatatccaatatttggattggcgtgctcgtcaagatcttcttaccatcatgctccttcacgacaaggtcgttgatgtactgaatcctctagctcgtgagtacaagtctattggtactgtgaagaaagaactagctggattgcaggaggaactagcgaaagcacaccaacaggttcatatatcagaagcaagggtttcaactgctttagagaagttagctcacatggaagaattggttaatgataggttgttaccagatagagttgcgacagaatcagacagaccttcgtattcaacctctgtccaggacttagacagggaaaagacaaacattggtgggaaaagcttgaatgtttctggtccggttcagccgtatagtccacacttgaagaacttttggtatcccgttgctttcactgcagatcttaagcatgacacgatggtaccaattgactgctttgagcaaccatgggtcatctttagaggagaagatgggaaaccaggatgtgtacggaacacatgtgcacatagagcgtgtcctcttgatctcggctcggtgaacaatggtcgtatccaatgcccttaccacggatgggaatactcaactgatggaaagtgtacgaagatgccatctacaaagctactgaatgtgaagataaaatcgataccttgtcttgaacaagacggtatggtctgggtttggcccggtgatgagccaccttcacctacacttccttgtttacaacctccatcagggtttgtaatccatgccgagcttgtaatggacctaccggtggaacacgggttgctactagataatctcttggatcttgcgcatgctccattcactcacacatctacttttgcaaaaggctggagtgtcccaagcctggtaaagttcttaacaccatcttcaggtcttcaaggatactgggatccgtatccaatcgatatggagtttaaaccaccttgtatcgtgttatcgacaataggaatctcaaaacctgggaagctagaaggaaagagcactgagcagtgtgcaacacatcttcatcaactccatgtttgtttaccttcttcaagaaacaagacaagacttctataccgaatgtcactagactttgctccaatattgaagaatcttccattcatggaacatctctggagacatttcgctgagcaggtcttaaatgaagatctacggttggttttgggacagcaagaaaggatgttgaatggtgcaaatatatggaacttacctgttgcttatgacaagcttggagttcggtatagactatggaggaacgctgtagatcgtggtgatgataaattacctttctcaggctaa

SEQ ID NO: 41 - protein, 534 aa, Brassica napus
MNAAVFTSSALSLPISFCKTRSSQLTRKKGVKGEFRVFAVFGEDSGLVEKKSQWGHLFDVEDPRSKTPPYKGKFMDVNQALEVARFDIQYLDWRARQDLLTIMLLHDKVVDVLNPLAREYKSIGTVKKELAGLQEELAKAHQQVHISEARVSTALEKLAHMEELVNDRLLPDRVATESDRPSYSTSVQDLDREKTNIGGKSLNVSGPVQPYSPHLKNFWYPVAFTADLKHDTMVPIDCFEQPWVIFRGEDGKPGCVRNTCAHRACPLDLGSVNNGRIQCPYHGWEYSTDGKCTKMPSTKLLNVKIKSIPCLEQDGMVWVWPGDEPPSPTLPCLQPPSGFVIHAELVMDLPVEHGLLLDNLLDLAHAPFTHTSTFAKGWSVPSLVKFLTPSSGLQGYWDPYPIDMEFKPPCIVLSTIGISKPGKLEGKSTEQCATHLHQLHVCLPSSRNKTRLLYRMSLDFAPILKNLPFMEHLWRHFAEQVLNEDLRLVLGQQERMLNGANIWNLPVAYDKLGVRYRLWRNAVDRGDDKLPFSG

SEQ ID NO: 42 - DNA, 1608 bp, Brassica napus
  CDS (1)..(1608)
atgaacgccgccgtgtttacttcttctgctttatctctacccatatccttctgtaaaactagatcatctcaagtcaccagaaagaagggagagttcagggtttttgctgtgtttggggaagatagtgggttagttgagaaaaagaatcaatgggggcatttgtttgatgtggaggatcctagatcaaaaactcctcctcctccttataaaggcaaaggcaagttcatggatgtaaaccaagcgcttgaagttgctaggctcgatatccaatatctggattggcgtgctcgtcaagatcttcttaccatcatgctccttcacgacaaggtcgttgatgtactgaatcctctagctcgtgagtacaagtctattggtactgtgaagaaagaacttgctggattgcaggaagaactcgcgaaagcacaccaacatgttcatatatcagaagcgagggtttcaactgctctagaaaagttagctcacatggaagaattggttaatgataggttattaccagttagagttgcgacagaatcagacagaccttcgtattcaacctctgtccaggacttagacagggaaaagacaaacattggtgggaaaagcttgaatgtttctggtccggttcagccgtatagtccacacttgaagaacttttggtatcccgttgctttcactgcagatcttaagcatgacacgatggtaccaattgactgctttgagcaaccatgggtcatctttagaggagaagatgggaaaccaggatgtgtacggaacacatgtgcacatagagcgtgtcctcttgatctcggctcggtgaacaatggtcgtatccaatgcccttaccacggatgggaatactcaactgatggaaagtgtacgaagatgccatctacaaagctactgaatgtgaagataaaatcgataccttgtcttgaacaagacggtatggtctgggtttggcccggtgatgagccaccttcacctacacttccttgtttacaacctccatcagggtttgtaatccatgccgagcttgtaatggacctaccggtggaacacgggttgctactagataatctcttggatcttgcgcatgctccattcactcacacatctacttttgcaaaaggctggagtgtcccaagcctggtaaagttcttaacaccatcttcaggtcttcaaggatactgggatccgtatccaatcgatatggagtttaaaccaccttgtatcgtgttatcgacaataggaatctcaaaacctgggaagctagaaggaaagagcactgagcagtgtgcaacacatcttcatcaactccatgtttgtttaccttcttcaagaaacaagacaagacttctataccgaatgtcactagactttgctccaatattgaagaatcttccattcatggaacatctctggagacatttcgctgagcaggtcttaaatgaagatctacggttggttttgggacagcaagaaaggatgttgaatggtgcaaatatatggaacttacctgttgcttatgacaagcttggagttcggtatagactatggaggaacgctgtagatcgtggtgatgataaattacctttctcaggctaa

SEQ ID NO: 43 - protein, 535 aa, Brassica napus
MNAAVFTSSALSLPISFCKTRSSQVTRKKGEFRVFAVFGEDSGLVEKKNQWGHLFDVEDPRSKTPPPPYKGKGKFMDVNQALEVARLDIQYLDWRARQDLLTIMLLHDKVVDVLNPLAREYKSIGTVKKELAGLQEELAKAHQHVHISEARVSTALEKLAHMEELVNDRLLPVRVATESDRPSYSTSVQDLDREKTNIGGKSLNVSGPVQPYSPHLKNFWYPVAFTADLKHDTMVPIDCFEQPWVIFRGEDGKPGCVRNTCAHRACPLDLGSVNNGRIQCPYHGWEYSTDGKCTKMPSTKLLNVKIKSIPCLEQDGMVWVWPGDEPPSPTLPCLQPPSGFVIHAELVMDLPVEHGLLLDNLLDLAHAPFTHTSTFAKGWSVPSLVKFLTPSSGLQGYWDPYPIDMEFKPPCIVLSTIGISKPGKLEGKSTEQCATHLHQLHVCLPSSRNKTRLLYRMSLDFAPILKNLPFMEHLWRHFAEQVLNEDLRLVLGQQERMLNGANIWNLPVAYDKLGVRYRLWRNAVDRGDDKLPFSG

SEQ ID NO: 44 - DNA, 2094 bp, Glycine max
  CDS (94)..(1692)
cccacgcgtccgcccacgcgtccgtacggctgcgagaagacgacagaagggggtttctcttcttttctcactcagtgtcacttcttcaccgccatgaatgctatagccactgcttctgctctctctcttccgatttttcttagagctgggaagcttgacaccaaaagggatttgaaaggtagatttagagtgtttgctgtatttggagaagaagagaagaaaaatgcatggggtgcgctttttgatgttgaggatccgagatctaagtttccacagaataaagggaaggttttggatatatctcaagcactagaagtggcaagacatgatattcagtacttagattggcgagctcggcaagatgtgctaacaatcatgcacctccatgaaaaggtggtcgaagttcttaatcctctagctcgcgaatataaatcaattggcaccctgaaaaaggagctagccgagttgcaggatgaattagcacaagcacacacacaggttcatatatctgaagcaagggttaccactgctttagataaacttgcttacatggaagaattggtaaatgataggctgttgcaagatcgaagcacgactgatgttgcccaaacatcctcttctcccagtacttctgcaaattctttagttacagaaaagagaaggcagccacggaaaagcttgaatgtatcgggtccagttcagtcataccatccccatttgaagaatttctggtatcctgttgctttttctaatgacctaaaggatgataccatgatcccaatagaatgttttgaggaaccatgggttatctttcgagggaaagatgggaagcctggatgtgtgcagaacacctgtgcacatagagcctgccctctgcaccttggttcagtaaatgagggtcgtatccaatgtccctaccatggctgggaatatactactgatggaaaatgtgagaaaatgccatctactcgacagctaaatgtgaaaataaagtcagttccatgctttgaaaaggagggaatgatctggatttggcctggcaatgaccccccagcagccacacttccatctatactacctccttctggatttgaaatccatgctgagattgtgatggaacttccaattgaacacggcttacttttggacaatcttttggatcttgcacatgccccttttactcacacctcaacatttgctaagggatggagtgttcccagcttggtgaattttttgacacctgcatctggcctgcaaggatactgggatccctatcctattgatatggagtttcgaccaccttgcatggtactatcaaccattggaatttcaaagcctgggaaactggagggacaaagtaccagggaatgttcaacgcacctgcaccaacttcatgtctgcttaccatcttcaaaacaaaagacaagattgctatacagaatgtcactggattttgctcctctgcttaagcatatacctttaatgaaatatctatggaggcattttgcagaacaggttttaaatgaggatctacggctagtggtggggcagcaagagagaatgaacaatggtgcaaacgtatggaatttcccagtagcctacgacaagcttggggtgagatacagaatgtggagagatgcattggagagaggagccaaacaactaccattctcaccacaacacatagattaagtacagagtgaacaatttttattttctttttctctcactcagtgatgcttcttaaatccttcgataaggaatttttcttttttcaactcaaggcttcatcatctctacaagagcttccggaaactgttgtattcatcagaggctgttcctttccctataatagtcgagtcttgacaccttttcacccttttttcattttttttaaatgtgtacagtttcaaaccatttttttccccttgtgatatctgcaccatctctcatctggtgccttaaccttacccttattcaaaggggaatgttgtctgacacaatattcagggcaatgtaatttaattcagaatacctgattggtttgggttacaacttcagacttttatatattttcaatagtgtttgttagga

SEQ ID NO: 45 - protein, 532 aa, Glycine max
MNAIATASALSLPIFLRAGKLDTKRDLKGRFRVFAVFGEEEKKNAWGALFDVEDPRSKFPQNKGKVLDISQALEVARHDIQYLDWRARQDVLTIMHLHEKVVEVLNPLAREYKSIGTLKKELAELQDELAQAHTQVHISEARVTTALDKLAYMEELVNDRLLQDRSTTDVAQTSSSPSTSANSLVTEKRRQPRKSLNVSGPVQSYHPHLKNFWYPVAFSNDLKDDTMIPIECFEEPWVIFRGKDGKPGCVQNTCAHRACPLHLGSVNEGRIQCPYHGWEYTTDGKCEKMPSTRQLNVKIKSVPCFEKEGMIWIWPGNDPPAATLPSILPPSGFEIHAEIVMELPIEHGLLLDNLLDLAHAPFTHTSTFAKGWSVPSLVNFLTPASGLQGYWDPYPIDMEFRPPCMVLSTIGISKPGKLEGQSTRECSTHLHQLHVCLPSSKQKTRLLYRMSLDFAPLLKHIPLMKYLWRHFAEQVLNEDLRLVVGQQERMNNGANVWNFPVAYDKLGVRYRMWRDALERGAKQLPFSPQHID

SEQ ID NO: 46 - DNA, 1752 bp, Glycine max
  CDS (42)..(1634)
gctttctctcttcagacagagactgtcagcttcgcaccgccatgaacgctattgcaactgctgcacttctctctctccctttctccttctccaaatcatccaagcttgacaccaaaaagggtttaaaaggaaggtttagagtgtttgctgtatatggagaagagatagataagaagaatacatggagtgccctctttgatgtggaggatccaagatccaaagtgccgcagtataaagggaagtttttggatgtatatcaagcccttgaagttgcaagatatgatattcaatactgtgattggcgagctagccaagacttgcttaccatcatgcttctccatgaaaaggtggtggaggttcttaatcctttagctcgtgattataagtccattggcaccatgaaaaaggagctagcagagttgcaggaagaattggcacaagcacaccaacaggttcatatatctgaggcaagggtgtccagtgctttagataaactagcttacatggaagaattagtaaacgataagttgttgcaagaaagaagcaccacagaagtttcccagacatcctcttctcccagtacttcttttaaacctgtagatatagaaaagagaagatcgccacgaaaaagcttggacatatcaggtccagttcagtcataccatacacacttgaagaatttctggtaccctgtagctttctctactgacttgaaggatgatacaatgatcccaatagaatgttttgaggaaccatgggtcatcttccgagggaaagatgggaagcctgggtgtgttcagaacacctgtgcacacagagcatgtcctctacaccttggttcggtgaatgagggtcgtatccaatgcccttaccatggctgggaatatactactgatggaaaatgtgagaaaatgccgtctactcgactgctaaatgtgaagataaagtcattgccatgttttgaaacagaggggatgatctgggtttggcctggcaatgaccccccgacggctacccttccatctttgctacctccatctgggtttgaagtgcatgctgagattgtcatggagcttcccatcgaacacgggttacttttggacaaccttttggatcttgcacatgccccttttactcacacttcaacttttgctaagggatggagtgttcccagcttggtgaaatttttgacacctgcatctggcctacaaggatactgggacccctatccaattgatatggagtttcgaccaccttgcatggttctatcaaccattggaatttcaaagcctggtaaactggaaggacaaagcaccagtcagtgtgccacacacctgcaccaacttcatgtctgcttaccatcttcaaaacaaaaaacaagattgctatacagaatgtcactggattttgctcctgtgcttaagcatattccttttatgcaacatctatggagatattttgcagagcaggttttaaacgaggatctacggctagtgttaggccagcaagagcggatgaacaacggtgcaaatgtgtggaatttcccagtatcctatgacaagcttggggtaaggtacagactatggagaaatgccttggagcaaggaactaagcaaccacccttcagcaaatgataaagattacaatactttttatctcagagtcttggaaccaacttttattaactaaaagccactcaggcacccccttgcactaggctaatccacacgttgcctttcctggttctttcag

SEQ ID NO: 47 - protein, 530 aa, Glycine max
MNAIATAALLSLPFSFSKSSKLDTKKGLKGRFRVFAVYGEEIDKKNTWSALFDVEDPRSKVPQYKGKFLDVYQALEVARYDIQYCDWRASQDLLTIMLLHEKVVEVLNPLARDYKSIGTMKKELAELQEELAQAHQQVHISEARVSSALDKLAYMEELVNDKLLQERSTTEVSQTSSSPSTSFKPVDIEKRRSPRKSLDISGPVQSYHTHLKNFWYPVAFSTDLKDDTMIPIECFEEPWVIFRGKDGKPGCVQNTCAHRACPLHLGSVNEGRIQCPYHGWEYTTDGKCEKMPSTRLLNVKIKSLPCFETEGMIWVWPGNDPPTATLPSLLPPSGFEVHAEIVMELPIEHGLLLDNLLDLAHAPFTHTSTFAKGWSVPSLVKFLTPASGLQGYWDPYPIDMEFRPPCMVLSTIGISKPGKLEGQSTSQCATHLHQLHVCLPSSKQKTRLLYRMSLDFAPVLKHIPFMQHLWRYFAEQVLNEDLRLVLGQQERMNNGANVWNFPVSYDKLGVRYRLWRNALEQGTKQPPFSK

SEQ ID NO: 48 - DNA, 609 bp, Helianthus annuus
  CDS (1)..(609)
cctcctgcagccacaattccttcactagaaccacctaagggattccaaatacacgccgagattgtcatggaactaccagtggagcatggactactattagacaacctgctggaccttgcgcatgcaccctttacgcacacttccacatttgcaaaagggtggagtgttccaagcttggttaaatttttgaccccttcatcaggtttggaaggatattgggatccgtatccaatagatatggaatttcgaccgccttgtatggtgttgtcaaccatcgggatttcaaaaccggggaaactggagggccaaagcacgaaacagtgttcaacgcatcttcaccaactacacgtctgcttaccgtcatcaagaaacaagacaaggctattatatagaatgtcacttgattttgctccggttttgcaatacgttcctttcatgcacatcctgtggaggcattttgcagaaaaggtactaaacgaggatctacggcttgtacttgggcaacaagataggatgatcaacggtgaaaatgtatggaacatgccggtatcttatgataagctcggagtaagataccgattatggagaaccgcagtccgagaaggatct

SEQ ID NO: 49 - protein, 203 aa, Helianthus annuus
PPAATIPSLEPPKGFQIHAEIVMELPVEHGLLLDNLLDLAHAPFTHTSTFAKGWSVPSLVKFLTPSSGLEGYWDPYPIDMEFRPPCMVLSTIGISKPGKLEGQSTKQCSTHLHQLHVCLPSSRNKTRLLYRMSLDFAPVLQYVPFMHILWRHFAEKVLNEDLRLVLGQQDRMINGENVWNMPVSYDKLGVRYRLWRTAVREGS

SEQ ID NO: 50 - DNA, 682 bp, Linum usitatissimum
gtgtcgacgatttcgtcgaaatctttcgcgggaaagatggacagccaggatgtgtccagaacacttgtgcacatcgagcatgccctatagagcttggtacaaagaacgagggacgaattcagtgtccttaccatggatgggagtactcaacagacggcaagtgcgagaaaatgccatctacaagactccttgatgtgaaattaaaatcactgccgtgtttcgagcaagaaggaatgatctgggtttggcctggtaatgacccacctgcaccaaatctcccttcgttgaaacctccagcaggttttcaaatacatgctgagatcgtcatggaacttccggtcgaacatggcttacttctcgataacctcttggatcttgcacatgccccttttactcacacttctactttcgccaaaggctggagtgtccccaacttcgtcaagtttctgacgcctgcgtctggccttcaaggatactgggacccttatccgatcgacatggaatttcgaccaccttgcatggtattgtcaaccattggtatctcaaagcctggaaagctcgaagggcaaagtacgagagaatgtgcaactcaccttcatcagcttcacgtctgcttaccttcaacaagaaacaagaccagactattatacagaatgtccctggatttcgctcctcttctaaa

SEQ ID NO: 51 - DNA, 747 bp, Brassica napus
  CDS (1)..(747)
atggcggcgacactaggcagagaccaatacgtgtacatggcgaagctggccgagcaagcggagcgatacgaggagatggtccagttcatggagagcctggtaagctccgccacgccggcgggggagctgacggtggaggagaggaacctcctctcggtggcgtacaagaacgtgatcggatctctcagagcggcgtggaggatcgtgtcatcgatcgagcagaaggaagagagcaggaagaacgaggagcacgtgtcgctcgtgaaggattacagatccaaggtggagggggagctctcgacgatctgctcggggatcctcaagctgctcgatacgcatctgatcccttcggctacggctagcgagtcgaaggtgttttacctgaagatgaagggggattaccatcgctacatggccgagttcaaatctggagatgagaggaagactgctgccgaagataccatgatcgcctacaaggctgctcaggatgttgcggttactgatctagcgcctacgcatccgatcaggctgggtctggctctcaatttctcggtgttttactacgagattctcaactcttctgagaaagcttgtagcatggccaaacaggctttcgaggaagccattgctgagctggacacgttgggagaggagtcgtacaaggacagtactctcatcatgcagttgctaagggacaacctaaccctctggacctccgacatgcaggagcagatggacgaggcgtga

SEQ ID NO: 52 - protein, 248 aa, Brassica napus
MAATLGRDQYVYMAKLAEQAERYEEMVQFMESLVSSATPAGELTVEERNLLSVAYKNVIGSLRAAWRIVSSIEQKEESRKNEEHVSLVKDYRSKVEGELSTICSGILKLLDTHLIPSATASESKVFYLKMKGDYHRYMAEFKSGDERKTAAEDTMIAYKAAQDVAVTDLAPTHPIRLGLALNFSVFYYEILNSSEKACSMAKQAFEEAIAELDTLGEESYKDSTLIMQLLRDNLTLWTSDMQEQMDEA

SEQ ID NO: 53 - DNA, 749 bp, Brassica napus
  CDS (1)..(747)
atggcggcgacactaggcagagagcagtacgtgtacatggcgaagctcgcggagcaggcggagcgttacgaggagatggtccagttcatggagcagctcgtcacatccgccgctccatcatcatcggagctcaccgtggaggagcgcaacctcctctcggtggcctacaagaacgtgatcggatctctgcgcgccgcgtggcgcatcgtgtcctcgatcgagcagaaggaggagagccgcaagaacgaggagcacgtgtcgctcgtgaaggattacagatccaaggtggagggggagctctcgacgatctgctcggggatcctcaagctgctcgatacgcatctgatcccttcggctacggctagcgagtcgaaggtgttttacctgaagatgaagggggattaccatcgctacatggccgagttcaaatctggagatgagaggaagactgctgccgaagataccatgatcgcctacaaggctgctcaggatgttgcggttactgatctagcgcctacgcatccgatcaggctgggtctggctctcaatttctcggtgttttactacgagattctcaactcttctgagaaagcttgtagcatggccaaacaggctttcgaggaagccattgctgagctggacacgttgggagaggagtcgtacaaggacagtactctcatcatgcagttgctaagggacaacctaaccctctggacctccgacatgcaggagcagatggacgaggctga

SEQ ID NO: 54 - protein, 249 aa, Brassica napus
MAATLGREQYVYMAKLAEQAERYEEMVQFMEQLVTSAAPSSSELTVEERNLLSVAYKNVIGSLRAAWRIVSSIEQKEESRKNEEHVSLVKDYRSKVEGELSTICSGILKLLDTHLIPSATASESKVFYLKMKGDYHRYMAEFKSGDERKTAAEDTMIAYKAAQDVAVTDLAPTHPIRLGLALNFSVFYYEILNSSEKACSMAKQAFEEAIAELDTLGEESYKDSTLIMQLLRDNLTLWTSDMQEQMDEA

SEQ ID NO: 55 - DNA, 747 bp, Brassica napus
  CDS (1)..(747)
atggcggcgacactaggcagagaccagtacgtctacatggccaagctcgccgagcaagccgagcgctacgaggagatggtcaacttcatggagaagctcgtcacaggcgcaacaccatcctccgaactcaccgtcgaagaacgtaacctcctctccgtggcttacaagaacgtgatcggatccctgcgcgccgcgtggcgcatcgtgtcctcgatcgagcagaaggaagagagcaggaagaacgaggaacacgtggcgctcgtgaaggactacagatctaaagtggagacggagctctcctccgtctgcgaagggatactaaagcttctcgaggagaatctgattccctctgcggcggcgagcgagtcgaaggtgttttatctgaagatgaagggggattaccatcggtacatggcggagtttaaggccggtgaggagaggaaagcggcggcggaggatactatggttgcttacaaggctgctcaggatattgcagctgctgatatggcgcctactcatccgattaggcttggtttggcgttgaatttctcggtgttttactatgagattcttaattcttcggacaaagcttgtgacatggccaaacaggcttttgaagaagccatagctgagcttgacactcttggagaagagtcgtacaaagacagcactctcattatgcagctgctcagggacaatcttaccctctggacctctgatatgcaggagcagatggacgaggcgtga

SEQ ID NO: 56 - protein, 248 aa, Brassica napus
MAATLGRDQYVYMAKLAEQAERYEEMVNFMEKLVTGATPSSELTVEERNLLSVAYKNVIGSLRAAWRIVSSIEQKEESRKNEEHVALVKDYRSKVETELSSVCEGILKLLEENLIPSAAASESKVFYLKMKGDYHRYMAEFKAGEERKAAAEDTMVAYKAAQDIAAADMAPTHPIRLGLALNFSVFYYEILNSSDKACDMAKQAFEEAIAELDTLGEESYKDSTLIMQLLRDNLTLWTSDMQEQMDEA

SEQ ID NO: 57 - DNA, 1052 bp, Glycine max
  CDS (42)..(794)
gcgctattctactcgcaagcaaatcagaacaagagaagagaatggcaggagcagaggggctaaacagagaacagtacgtgtaccttgcgaagctgtcggagcaggcggagcggtacgaagagatggtggagttcatgcagaaggtggtggtggggtggacgccggcgtcggagctcacggtggaggagcgcaacctcctctcggtggcctacaagaacgtgatcgggtctctgcgtgccgcgtggcgcatcgtgtcctccatcgaacagaaggaggaagggcgcaagaacgacgaccacgtgtccctcgtgaagcactacagatccaaggtcgagaacgagctcacgcaggtctgcgccagcatcctcaacctcctcgactccaacctcgtaccctccgtcttcgccagcgagtccaaggtcttctacttgaagatgaagggcgattaccaccgctatctcgcagagtttaaggttggggatgagagaaaaaccgctgctgaggataccatgttgtcttacaaggctgcccaggacattgcttctggggatcttccccctactcaccccatcagattgggtctcgctctcaacttctccgtcttctactatgaaatcctcaaccagtctgacaaagcgtgtgccatggctaaacaggcttttgaggaagcaattgctgagctggacaccttgggagaagaatcctacaaagacagcacgctcataatgcagcttttaagagacaacctcaccctttggacttctgatgtccaggaccagctagatgagccctgatatccattataggtttgatgggtggtattcttcctctcatggaggtgggctttgaatgtcatttctttgtgctaaattaagaatcgccctagtttataaaatgattggcaatctgtgatataatgttgtatgaacagagaccaggcttctttgttttttatttttatgtctcatgatattttggaaaggatactgtataatgggatatccaattaattaattattatatctgttgcaatctttacctacaaaaaaaaa

SEQ ID NO: 58 - protein, 250 aa, Glycine max
MAGAEGLNREQYVYLAKLSEQAERYEEMVEFMQKVVVGWTPASELTVEERNLLSVAYKNVIGSLRAAWRIVSSIEQKEEGRKNDDHVSLVKHYRSKVENELTQVCASILNLLDSNLVPSVFASESKVFYLKMKGDYHRYLAEFKVGDERKTAAEDTMLSYKAAQDIASGDLPPTHPIRLGLALNFSVFYYEILNQSDKACAMAKQAFEEAIAELDTLGEESYKDSTLIMQLLRDNLTLWTSDVQDQLDEP

SEQ ID NO: 59 - DNA, 1062 bp, Helianthus annuus
  CDS (55)..(825)
ttttacaaaaacaaaacaaaaaaagttagtatccgagctctgagatcggcatccatggctgcttctgctgaacgcgaaaacttcatctacgtcgccaagctcgccgagcaagctgaacgctatgacgagatggtcgatgccatgaagaaagtagcaatgttggatattgaattgacggttgaggagagaaatttgctctcagttggatacaagaatgtggtgggttcacgtagggcatcatggaggatattgtcctccattgagcaaaaagaggagtcaaggggcaatgaagttaacgtcaagcggattaaggaatataggcagaaggtggaaacagagctgtcgaacatttgcaaagatatcatggctgtgattgacgagcatctgattccatcttcctctgcgggagaatccactgttttctactacaaaatgaaaggagactattataggtatcttgcggagttcaagtctggcaatgacaaaaaagaagcagctgatcagtcacttaaggcttatcaattggcttctactgctgcagaggaattatctcctacgcatcccattagattgggtttggctttgaacttctccgttttctattacgagatcatgaactctcccgaaagagcctgtcacctggcaaaacaagctttcgatgaagctatctcagaacttgattcgttgagtgaggaatcatacaaagatagcactttaattatgcagctcctgagggacaatctcactttgtggacctccgatattccagaggatggagaggaccaaaagatggagatcaccaaatctggtgaagatgcagagtaaaatttggagggtaagtgtacatccttggagggagtggatgtggcctttgttattgtatttgtaagcctaaatttgaaagcgataacatgagaatcgcacgcgttagttgttttcgtttgttcttcttgtaaaatgcccagaaatgggacgtttatggcatggccacatatattatgatccaggcttgtttctgcaaaagaaactaacaaaaaaaaaaaaaaaaaaaaaaaaaaaaaa

SEQ ID NO: 60 - protein, 256 aa, Helianthus annuus
MAASAERENFIYVAKLAEQAERYDEMVDAMKKVAMLDIELTVEERNLLSVGYKNVVGSRRASWRILSSIEQKEESRGNEVNVKRIKEYRQKVETELSNICKDIMAVIDEHLIPSSSAGESTVFYYKMKGDYYRYLAEFKSGNDKKEAADQSLKAYQLASTAAEELSPTHPIRLGLALNFSVFYYEIMNSPERACHLAKQAFDEAISELDSLSEESYKDSTLIMQLLRDNLTLWTSDIPEDGEDQKMEITKSGEDAE

SEQ ID NO: 61 - DNA, 1070 bp, Helianthus annuus
  CDS (380)..(1000)
ttttgtacgtataaccacaaatattaattagtacttataaaatcacaacctagaaagtattgcaaggatggaacttggaagtcaattaagcataatattcagaacagaaatgcataaaattcctacagctaaagagtagacactcgcaacgcgtagcattttttcaatcgaaaagcaaacaattacaaaccacagtacggtcttgaagacgagagaaaagttgttactcgtcggccttgggtgcttctttaatttcctcggcactgtcatcctgcatgtctgaggtccacaacgtgaggttatcacgaagaagctgcattatcagggtgctgtccttgtaggaatcctctcctagggtatccaattctgcaatggctcaaccaaaagcctgtttcgcaagattacatgcacggtcaggagaattcaagatctcatagtagaacacagagaagttaagcgccagtccaagacggatcgggtgagttggagccagttctgcattcgcaatatcctgagccgctttgtaagcagacagagtattctcagcagcttccttcctctcagatccagtcttaaactcagccaaatacctgtaataatcacctttcatcttcaaatagaacaccttagagtcaccgctagtagcagatccaatcagcttcgagtccagaagcttcagaataccatcacagatcgaagataactccgactcgatcttagatctgtaatcacggatggtcgaaacgtgagcttcgttgcctctgctctcctctttctgctcgattgatgagatgatacgccaggaagctctccgtgctccgatcacgttcttgtaggcgacggagaggaggtttcgctcctcgatggtgagttcttcgccgccgtctgcggcggcgacgactttctccatgaattcaaccatttcttcgtagcgttcggcttgttcggcgagtttcgccatgtatacattgtcttcgcgtggtgatgatgcggcggccatcggtggtggtgtgtgtgatgaaacggtggagagagagagagtagcggttatcgttgaaacctattcggtc

SEQ ID NO: 62 - protein, 207 aa, Helianthus annuus
MAAASSPREDNVYMAKLAEQAERYEEMVEFMEKVVAAADGGEELTIEERNLLSVAYKNVIGARRASWRIISSIEQKEESRGNEAHVSTIRDYRSKIESELSSICDGILKLLDSKLIGSATSGDSKVFYLKMKGDYYRYLAEFKTGSERKEAAENTLSAYKAAQDIANAELAPTHPIRLGLALNFSVFYYEILNSPDRACNLAKQAFG

SEQ ID NO: 63 - DNA, 789 bp, Helianthus annuus
  CDS (62)..(787)
tttcggtgtaacagaaactgtgtggtttctccgtcatcatcgtccaccagcaccagcgtcaatggccgtactgcgggacaatctaaccagagaacagtatgtatacctggcgaagcttgcggagcaagccgagaggtacgaagagatggtgaagttcatggaaaagctcgtcgtcggaacaacgccggcggctgaactcaccgtcgaggagcgcaaccttctctccgtcgcttacaagaacgtcatcggttcgcttcgagctgcttggcgtatcgtttcatcgatcgaacaaaaggaggagtctcggaagaacgaggatcacgtgatgctggtcaaggactacagatctaaggtcgagaacgaactctccgatgtttgctctggaatattgaaacttatggattcgaatctgttgccgtctgcatccaccggtgaatctaaggtcttctatttgaagatgaaaggagattatcataggtatttagccgagttcaaaaccggagatcaccggaaggaggctgcagaggctactatgaattcctacaaagctgctcaggatatcgcgctctcggatttggctccaacacacccgataagattgggtctggcgctcaacttctccgtgttttattatgagattctgaactcatctgacaaggcttgtagcatggcaaaacaggcatttgaagaagccattgctgagttggacactctgggtgaagactcgtacaaggatagcactctgatcatgcaactactgagggacaatctcactctttggacttctga

SEQ ID NO: 64 - protein, 242 aa, Helianthus annuus
MAVLRDNLTREQYVYLAKLAEQAERYEEMVKFMEKLVVGTTPAAELTVEERNLLSVAYKNVIGSLRAAWRIVSSIEQKEESRKNEDHVMLVKDYRSKVENELSDVCSGILKLMDSNLLPSASTGESKVFYLKMKGDYHRYLAEFKTGDHRKEAAEATMNSYKAAQDIALSDLAPTHPIRLGLALNFSVFYYEILNSSDKACSMAKQAFEEAIAELDTLGEDSYKDSTLIMQLLRDNLTLWTS

SEQ ID NO: 65 - DNA, 1151 bp, Linum usitatissimum
  CDS (49)..(837)
cgcctcttcctttcttattggctgttgtataatttatactgaataaagatgtcgccatctgaagcatcacgcgaggacaatgtctacatggcaaagttggctgagcaggctgaacgttacgaggaaatggtggagtttatggagaaagttgccaagacagttgatgttgaggagctgaccgtggaggaaaggaacctactttctgttgcttacaagaacgtgattggggccagaagagcttcatggaggattatctcttccatcgagcagaaagaagaaagcaggggaaatgaggaccatgtttctactatcaaggattacaggtctaagattgaaactgagttgagcaagatttgtgatggcatcctgaaccttcttgagtcgcatctcattcctgctacctccgctgctgagtctaaggtcttttaccttaaaatgaagggtgactaccataggtatcttgcagagtttaaaactggagctgagaggaaggaagctgctgagagcaccttgttggcttacaagtccgctcaggatattgcccttgctgatctggcccctacccacccaatccgtttgggactggcacttaacttctccgttttctactatgagatcctcaactcacctgatcgtgcatgcaatcttgcaaagcaggcttttgatgaggctatctctgagctggacacattaggggaagaatcatacaaggacagcacattgatcatgcaattgctccgtgacaatttgacactgtggacttctgatatcacggatgatgctggagatgagatcaaggaagcatcaacgaagccttcgggagagggacaacaatagttgagcatccgttagggattatgcatgtaatctattgtgaactatttgtcgtttgatgcacaagtacaatggattagaagaaagtatgatgatggggtgggtggtgttggagtagagtctgttttcatggatccatatgtctttttttttgtgtggccgacgcctgtgtttgcaatggctttggttagtccagttgagaatgttggattgttgttagattcctaatggtaatgcaatggtttctgttccctctctatttttataaaggtaccccttcttcaaaaaaaaaaaaaaaaaagcggccgctctagagg

SEQ ID NO: 66 - protein, 262 aa, Linum usitatissimum
MSPSEASREDNVYMAKLAEQAERYEEMVEFMEKVAKTVDVEELTVEERNLLSVAYKNVIGARRASWRIISSIEQKEESRGNEDHVSTIKDYRSKIETELSKICDGILNLLESHLIPATSAAESKVFYLKMKGDYHRYLAEFKTGAERKEAAESTLLAYKSAQDIALADLAPTHPIRLGLALNFSVFYYEILNSPDRACNLAKQAFDEAISELDTLGEESYKDSTLIMQLLRDNLTLWTSDITDDAGDEIKEASTKPSGEGQQ

SEQ ID NO: 67 - DNA, 4275 bp, Brassica napus
  CDS (1)..(4275)
atgccttcacttcaactattgcagttaactgagcggggtcggggtcttgtagcgtcaagacggaaatctatactgcttgcggctgggattgtagctgctggtggaactgctgtttacctgaaatcaagggtcgcttcccggaggcctgattcttcgcgtctttgcaatggtcagagtgatgatgatgagactttggaaaagctgactgcaactgatcaaaatgcaaagataaccacgaaaaagaagaaaggaggaggattgaagtctcttcaggttctgactgctattcttctctctcagatgggaaaaatgggtgccagggatcttttggcactagtcgccaccgtggttttcagaacagctttgagcaatagattggcaaaagtgcaaggtttccttttccgtgctgctttcttaaggcgtgcgccactgtttctacggctcatctccgagaatattatgttgtgtttcatgctatcaacattgcactctacttcaaagtacataactggggcattgagtttgcgattcagaaagatattgaccaagattatccattcacactattttgagaatatggtatattacaaaatatcacacgtggatggtcggattacgcaccctgaacaaagaattgccagcgatgtaccaagattctcctcagagttgagcgatcttatactggatgatttgacggcggttactgatggaattttgtatgcatggcgcctgtgttcatatgctagtccaaaatacatcttctggatactggcctatgtactgggggctgggacggcgataagaaacttttctccttcttttgggaaattgatgtccaaggaacagcagttagaaggagagtaccggcaacttcattcacgcttaaggactcattcggaaagcatagcattctatggtggggaaaccagggaagaatctcatatacaacaaaagttcaagaatcttgttagccatatgagtcacgtgcttcatgatcactggtggtttggtatgatccaagattttctgctgaagtatcttggggccacagttgcagttattctgattatcgaaccattcttctctgggcatctaagacctgacgactcgaccttaggaagagctgagatgcttagcaatataagatatcacactagtgtcattatatctctctttcaggcgttgggaacactttctataagttccaggcggctcaaccgactcagtggttatgctgaccgaatccatgagttgatggctgtctcaagagaactcagtggtgatgataaatcgtctttccagagaaatagaagcagaaattatctaagtgaagctaattatgtagagttttccgatgtcaaggttgttactccaaccggaaatgttttggtggaggatctcacccttcgagttgagcaagggtctaatcttctgattacaggaggtctatggcccctggtgtctggacatattgtgaagccaggagttggttctgatcttaacaaggagatcttctatgtgccgcaacggccttatatggcagtaggaacacttcgtgaccagttaatatatcctcttacttctggccaagagagtgaactgctcactgagattggaatggtggagctattgaaaaatgtcagtatccttgtttctctattctatactaggatggttgatctagaatatttattggatcgctaccaacctgaaaaagaggttaattggggtgatgaattatctcttggagagcaacagagattgggtatggccagactattctaccacaaacccaaatttgcaattctagatgaatgcacaagtgctgtcacaactgatatggaagaacgctttgccgctaaggttcgagctatgggaacttcttgcataacaatctcccatcgtccagcgcttgttgcattccatgatgttgttctgtcattagacggtgaaggaggatggagtgttcattacaagagggatgactctgcccttctgacggatgctgaaattgattcagtgaaaagttcagatacagatcggcaaaatgatgcgatggttgttcaacgagcgtttgctgcagctagaaaggtctcagccgaagttttatttgaatctgctactaattcaaaggctcagtcgtaccagacacagttaattgcaagatcacctgttgtagataaaagtgtagtgttgcctcgttttcctcaacctcaaacatcccaaagggctttaccatcaagagtagctgcaatgttaaacgtgttgcttccttggaaaccccaccttttgttttgcatttccacttggctaacttattcgtcctgcgctgatgctaatattgatattatacttctcaaaataactgaccacttcattgttacatttcagatacccactatatttgacaagcaaggagctcaactgcttgctgttgcttgccttgtcgtctcaagaacgctgatctctgaccgaatagcctctttgaatggcaccactgtgaagtatgtcttggagcaagataaggcatcctttgctcgtctgattggtttgagtgttctccaaagtggtgcatcttctgtcattgctccttcattaaagcatctaacgcaaaggctagctctagggtggaggattcgtttgactcaacatctgcttcggaattacttgagaaataatgcgttttacaaggttttccacatgtcaggcaatagtattgatgcggaccaaagactcactcgtgacctggaaaagttaacccatgacttgtctggacttcttactggaatggttaagccatcggttgacattctgtggttcacctggaggatgaagctattgactggtcaaaggggagttgccatactttacacatatatgttacttggtctgggtttcttgagacatgttgctcccgattttggtgatctagccggtgaagaacagcagcttgaagggaagtttaggtttatgcacgagagactgaacactcatgctgaatccattgcattctttggaggcggagctcgagaaaaagcgatggtcgacccggctgctggattttgggtagttatttttgaatcaaagctaccggaagtgaacttggaattgttttatcatttatgtgatgatggtcttttcatgtcaaatgtgcggaattcccgggtcgacacaaagttcagggcactattggaccattctctcatgctcttgaagaagaaatggttgtatggcatacttgatgatttcgtgacaaagcaacttcccaataatgtgacttggggattaagtttgttgtatgctttagaacacaagggagatagagcacttgtctccactcaaggtgaattggcacatgcattgcggtatctagcttccgtcgtctcccaaagctttatggcgtttggtgatattcttgaactacacaagaagttccttgagctctccggtggtattaacagaatttttgagctcgatgagtttttggaggcttctcagtcaggtgctaactcagataatcacagaagccgtttggattctcaagatcgaatttccttttcagaggtggacatcattacccctgctcagaaattgatggcaagcaagttgtcatgcgaaatagtttcagggaaaagcttactcgtcacaggtccaaatggtagtggaaagacttctgtatttagagtccttagagatatctggcccactgtatgtggaagactttccaaaccatcattggacatcaaggaacttgggtcagggaatggcatcttttttgtccctcagcgaccttatacatgtttagggacgctgagagatcagattatataccctctatctaaagaagaagcagagaaaagggcagcaaagctgtacaccaatggagaaacctcagctgaagctggaaacattctggacgttcatttgaaaaccatactggagaatgttcgtttagtttatctattggaaagagatgaaagtggttgggatgctactaccaactgggaagacatattatctcttggagaacaacagaggctaggcatggcacgtttgttctttcacagacccaagtttggaatcctagatgaatgcaccaatgcgacgagtgttgatgttgaggaacagctctacagggttgcaaaagacatgggagttactttcataacctcatcacaacgtccggcactgatcccgttccactcattggagctaaggctgattgatggagaaggaaactgggagctacgttctatcgagcaggcagcagagtaa

SEQ ID NO: 68 - protein, 1424 aa, Brassica napus
MPSLQLLQLTERGRGLVASRRKSILLAAGIVAAGGTAVYLKSRVASRRPDSSRLCNGQSDDDETLEKLTATDQNAKITTKKKKGGGLKSLQVLTAILLSQMGKMGARDLLALVATVVFRTALSNRLAKVQGFLFRAAFLRRAPLFLRLISENIMLCFMLSTLHSTSKYITGALSLRFRKILTKIIHSHYFENMVYYKISHVDGRITHPEQRIASDVPRFSSELSDLILDDLTAVTDGILYAWRLCSYASPKYIFWILAYVLGAGTAIRNFSPSFGKLMSKEQQLEGEYRQLHSRLRTHSESIAFYGGETREESHIQQKFKNLVSHMSHVLHDHWWFGMIQDFLLKYLGATVAVILIIEPFFSGHLRPDDSTLGRAEMLSNIRYHTSVIISLFQALGTLSISSRRLNRLSGYADRIHELMAVSRELSGDDKSSFQRNRSRNYLSEANYVEFSDVKVVTPTGNVLVEDLTLRVEQGSNLLITGGLWPLVSGHIVKPGVGSDLNKEIFYVPQRPYMAVGTLRDQLIYPLTSGQESELLTEIGMVELLKNVSILVSLFYTRMVDLEYLLDRYQPEKEVNWGDELSLGEQQRLGMARLFYHKPKFAILDECTSAVTTDMEERFAAKVRAMGTSCITISHRPALVAFHDVVLSLDGEGGWSVHYKRDDSALLTDAEIDSVKSSDTDRQNDAMVVQRAFAAARKVSAEVLFESATNSKAQSYQTQLIARSPVVDKSVVLPRFPQPQTSQRALPSRVAAMLNVLLPWKPHLLFCISTWLTYSSCADANIDIILLKITDHFIVTFQIPTIFDKQGAQLLAVACLVVSRTLISDRIASLNGTTVKYVLEQDKASFARLIGLSVLQSGASSVIAPSLKHLTQRLALGWRIRLTQHLLRNYLRNNAFYKVFHMSGNSIDADQRLTRDLEKLTHDLSGLLTGMVKPSVDILWFTWRMKLLTGQRGVAILYTYMLLGLGFLRHVAPDFGDLAGEEQQLEGKFRFMHERLNTHAESIAFFGGGAREKAMVDPAAGFWVVIFESKLPEVNLELFYHLCDDGLFMSNVRNSRVDTKFRALLDHSLMLLKKKWLYGILDDFVTKQLPNNVTWGLSLLYALEHKGDRALVSTQGELAHALRYLASVVSQSFMAFGDILELHKKFLELSGGINRIFELDEFLEASQSGANSDNHRSRLDSQDRISFSEVDIITPAQKLMASKLSCEIVSGKSLLVTGPNGSGKTSVFRVLRDIWPTVCGRLSKPSLDIKELGSGNGIFFVPQRPYTCLGTLRDQIIYPLSKEEAEKRAAKLYTNGETSAEAGNILDVHLKTILENVRLVYLLERDESGWDATTNWEDILSLGEQQRLGMARLFFHRPKFGILDECTNATSVDVEEQLYRVAKDMGVTFITSSQRPALIPFHSLELRLIDGEGNWELRSIEQAAE

SEQ ID NO: 69 - DNA, 1323 bp, Brassica napus
cggaattcccgggtcgacacaaagttcagggcactattggaccattctctcatgctcttgaagaagaaatggttgtatggcatacttgatgatttcgtgacaaagcaacttcccaataatgtgacttggggattaagtttgttgtatgctttagaacacaagggagatagagcacttgtctccactcaaggtgaattggcacatgcattgcggtatctagcttccgtcgtctcccaaagctttatggcgtttggtgatattcttgaactacacaagaagttccttgagctctccggtggtattaacagaatttttgagctcgatgagtttttggaggcttctcagtcaggtgctaactcagataatcacagaagccgtttggattctcaagatcgaatttccttttcagaggtggacatcattacccctgctcagaaattgatggcaagcaagttgtcatgcgaaatagtttcagggaaaagcttactcgtcacaggtccaaatggtagtggaaagacttctgtatttagagtccttagagatatctggcccactgtatgtggaagactttccaaaccatcattggacatcaaggaacttgggtcagggaatggcatcttttttgtccctcagcgaccttatacatgtttagggacgctgagagatcagattatataccctctatctaaagaagaagcagagaaaagggcagcaaagctgtacaccaatggagaaacctcagctgaagctggaaacattctggacgttcatttgaaaaccatactggagaatgttcgtttagtttatctattggaaagagatgaaagtggttgggatgctactaccaactgggaagacatattatctcttggagaacaacagaggctaggcatggcacgtttgttctttcacagacccaagtttggaatcctagatgaatgcaccaatgcgacgagtgttgatgttgaggaacagctctacagggttgcaaaagacatgggagttactttcataacctcatcacaacgtccggcactgatcccgttccactcattggagctaaggctgattgatggagaaggaaactgggagctacgttctatcgagcaggcagcagagtaaaaactcagcaagacacttaagagaaggttctatatacactagttttaataataatagcaaagctaaagcaaaaaagccataagaccatatgcaaatgcaagtaatatctttagcacaaagtcctctatatgggtgggtatgtacctactctgctttcgacagtgtaggtagaattgaattggagaatctctcacatggagg

SEQ ID NO: 70 - DNA, 561 bp, Brassica napus
ggcaccactgtgaagtatgtcttggagcaagataaggcatcctttgctcgtctgattggtttgagtgttctccaaagtggtgcatcttctgtcattgctccttcattaaagcatctaacgcaaaggctagctctagggtggaggattcgtttgactcaacatctgcttcggaattacttgagaaataatgcgttttacaaggttttccacatgtcaggcaatagtattgatgcggaccaaagactcactcgtgacctggaaaagttaacccatgacttgtctggacttcttactggaatggttaagccatcggttgacattctgtggttcacctggaggatgaagctattgactggtcaaaggggagttgccatactttacacatatatgttacttggtctgggtttcttgagacatgttgctcccgattttggtgatctagccggtgaagaacagcagcttgaagggaagtttaggtttatgcacgagagactgaacactcatgctgaatccattgcattctttggaggcggagctcgagaaaaagcgatggtcgacccg

SEQ ID NO: 71 - DNA, 1122 bp, Brassica napus
cggaattcccgggtcgacacaaagttcagggcactattggaccattctctcatgctcttgaagaagaaatggttgtatggcatacttgatgatttcgtgacaaagcaacttcccaataatgtgacttggggattaagtttgttgtatgctttagaacacaagggagatagagcacttgtctccactcaaggtgaattggcacatgcattgcggtatctagcttctgtcgtctcccaaagctttatggcgtttggtgatattcttgaactacacaagaagttccttgagctctctggtggtattaacagaattttcgagctcgatgagtttttggatgcttctcagtcaggtgttaactcagaaaatcgcacaagccgtttggattctcaagatcgaatttccttttcagaggtggacatcattacccctgctcagaaattgatggcaagcaagttgtcatgcgaaatagtttcagggaaaagcttactcgtcacaggtccaaatggtagtggaaagacttctgtatttagagtccttagagatatctggcccactgtatgtggaagactttccaaaccatcattggacatcaaggaacttgggtcagggaatggcatcttttttgtccctcagcgaccttatacatgtttagggacgctgagagatcagattatataccctctatctaaagaagaagcagagaaaagggcagcaaagctgtacaccaatggagaaacctcagctgaagctggaaacattctggacgttcatttgaaaaccatactggagaatgttcgtttagtttatctattggaaagagatgaaagtggttgggatgctactaccaactgggaagacatattatctcttggagaacaacagaggctaggcatggcacgtttgttctttcacagacccaagtttggaatccttgatgaatgcaccaatgcgacgagtgttgatgttgaggaacagctctacagggttgcaaaagacatgggagttactttcataacctcatcacaacgtccggctctgatcccgttccactccttggagctaaggctgattgatggagaaggaaactgggagctacgttctatcgagcagacagcagagtag

SEQ ID NO: 72 - DNA, 1097 bp, Glycine max
ttcacttggagaatgaagatgttaacaggtcggaggggagttgccatactctatgcttacatgttgcttggtttgggatttctaagaactgttactccagattttggtaatttgattagtcaagaacaacaacttgaaggaacatttaggttcatgcatgaaagactttgtactcatgctgaatctgttgctttctttggaggtggtgctcgagaaaaagctatggtcgagtctagattcagggaacttctcctccactccaagtaccttttaaaaaagaagtggctgtttggaatcctggatgattttatcacaaagcaacttccacataatgtgacttggggcttgagcttaatatatgccatggaacacaagggagaccgtgcatcagtaactactcagggtgagctagcacatgcactgaggtttttggcatctgttgtttctcaaagctttttagctttcggtgatattcttgaattgcatagaaagtttgtagaactctctggtggaattaatcggatttttgaacttgaagaacttcttgatgcagcacaatctgagaatttcacgagtgttagtgctatacctccagtgagggatgttcattccagtgatgtcatttccttttcaaaagttgatatcgtaaccccttctcagaagatgttggccagggagttaatatgtgacattgagcatggggaaagcctgcttgttactggtccaaatggaagtggaaaaagttccattttcagagttcttagaggactatggccaattgccagtggaagactctctagaccatctgaagttgtggatgaagaggatggatctggttgtggcatcttctatgttcctcaacggccatatacatgtttgggaaccctaagggatcaaattatatatcccctttcctgtgaggaagcagaggttaaagtactgaagatgtatggaaaagatgaaaagcatgctgacaccagaaatttgttagacacacggttaaaagctatcctagagagtgttcggttgaattatcttctagaaagggagggaagcaactgggatgcgaatttaaaatgggaagacattctttctct

SEQ ID NO: 73 - DNA, 439 bp, Glycine max
ttcaaaggcacaatcggatatttcagaagtgataatagcatcatctccatctatgaagcgtaacatttcaccatctgctgttccccaacttcacggtaatacaagggcattgccgatgagagtagctgccatgtgcaaagtattggtgcccaccatatttgataaacaaggagcacgactacttgctgttgcttttcttgttgtttcaagaacatgggtctcagatcgtattgcatcactgaatggtactactgtgaagcttgttttggagcaggataaagcttcctttattcgattaattggtataagtgttattcaaagtgctgcatcttctttcattgcaccttctataagacacttgatagagaggctagcccttggggggcggattcgtttgacccaacatcttctcaagaactacttaagaaacaatgcattc

SEQ ID NO: 74 - DNA, 685 bp, Glycine max
ttgtggcatcttctatgttcctcaacggccatatacatgtttgggaaccctaagggatcaaattatatatcccctttcccgtgaggaagcagaggttaaagcactgaagatgtatgggaaaggtgaaaagcatgctgacaccagaaatttgttggacacacggttaaaagttatcctagagagtgttcggttgaattatcttctagaaagggagggtagcaactgggatgccaatttaaaatgggaagacattctttctcttggagaacagcaaagattggggatggcacgcttgttctttcacgagcccaaattcggtatccttgacgagtgcaccaatgcaactagtgttgatgttgaagaacacctatacgggcttgcaaaagatatgggaatcacggttgttacttcctcacaagtaagttgattatataagtatatttgaaaaagaaaaaaaaaagggacatggtaaatttagtgacttaagagtagtaattcactaattagttggtttgagcttgcctcatttccttctgagtgtacacttatttaatttctttagttctagataaaccagttattaacttggctaaccttatggcttagacatgcatctttgccataataatgtgtgatcaaactaaatatctctgctcctgcccccagcgacctgctttaataccat

SEQ ID NO: 75 - DNA, 685 bp, Glycine max; identical to SEQ ID NO: 74

SEQ ID NO: 76 - DNA, 833 bp, Glycine max
ttttttttttttttttttttttttttcagctggcacgggagtaatggacaacatagaaactaaagcgtacaaagatgcatagaattatgaagggagtaaaataatctctaaaagctactcctgtttcgtgccgttttattgataaaataacattaataattacatccaattgttacaaaatgtgaataaatatctaagtaactaataatagaagcgaaaaccctgtacataattgattatatactgcagagatcatgaaaaggttgtgcactccaacttactatcaatcattttggctatcgatgctgtttttgtttgtttgtcctcccgggtcgacggagcaagcttggagaatatggtaaacccaaaatgaaaaaagaaaaaagaagaaaaaaaaatataaaggaatgaccatcatggcaagcctaatatctgcttgcaatcattctgtatgttcgaagactcagcaacatctcaaatagtaacaatgagaatctgcaggtgcgaaagtcattgcttgatcgaacgaagttcccaattaccctcaccatcaatcagacgcaattccatggaatgaaatggtattaaagcaggacgttgtgaggaagtaacaacagtgatccccattttgttcgctagcccatataggtgttcttcaacatcaacgctagtggcattggtacactcgtccaggataccaaatttaggcttatggaagaacaagcgtgccatgcctaatctctgctgttctccaagagaaagaatgtcttcccattttaaattcgcatcccagttgcttccctccctttctagaagataattcaactcgaaat

SEQ ID NO: 77 - DNA, 661 bp, Glycine max
gagcaaaaaaatgaagcttggagaatacggtaaacccaaaatgaaaaagaaaaagaaaaaaaaaataaaggaatggccaccatggcaagcctaaaatctgcttgcaatcattctgtatgttcaagacttggcaacatctaatagtaacaatgagaatcctgcaaagtcattgcttgatcgaacgaagttcccaattaccctcaccatcaatcagatgcaattccatggaatgaaatggtattagagcaggacgttgtgaggaagtaacaactgtgatccccattttgttcgctagcccatataggtgttcttccacatcaacgcttgttgcattggtacactcgtccaggataccaaatttgggcctatgaaagaacaagcgtgccatgcctaatctctgctgttctccaagagaaagaatgtcttcccattttaaattcgcatcccagttgcttccctccctttctagaagataattcaaccgaacactctctaggatagcttttactcgtgtgtctaacaatttcccgtgtcagcatgcttttcctcttttccatactctctcagtactttaacctctgcttcctcacaggaaaggggatatataatttgatcccttagggatcccaaccatgtatatggccgttgaggaacatagaag

SEQ ID NO: 78 - DNA, 844 bp, Glycine max
ataagcccaaatttggtattcttgacgagtgcaccaatgcaactagtgttgatgttgaagaacacctatatgggcttgcaaaagatatgggaatcacggttgttacttcctcacaacgtcctgctttaataccatttcattccatggaactgcggctgattgatggtgaaggtaattggaagcttcgattgatcaagcagtgagttcactaaaacagtgttgctgcatggacttggtataccatttgagatgttgtcgagtctatcacaagctggctgtttgcgagcataaattaggtttgccaacaaaggtcaatcctatatgcttttattttaagttttccatattctccaagattcaatgtttactaggggactaacaaacagctgaaacagccaaaattgttgataataagttcgagcacacaaccattgcataatctctgcagtgtataggtggtgatcaatcatgtatagttttccccctttcttcttaggtagttgatattggttcatatgttgtagtcattggatgtaatgattaatatttaaattgtttaatcaataaaacagcagaaaagaagggctcttcgagctaatttgttgccttcaaaaaaaaaaaaaaaaagtcgtgtaagattttttcttttttttatgttctttactcttcttgtgccacctgaactgctgtcatcccttgcgttgccttcattgttcctatgtggccatgttgtattactgaattactcgggcaataatacgaaacttacaaaaaatctatttcttgagagaggagagagagagaccgacacgcacggcgctggcgaaatcgtcgaccgggaatt

SEQ ID NO: 79 - DNA, 1459 bp, Zea mays
ttttttttttttttttcggatgaatttcctatagattattttttttttttttttacaagggcacactttgtgccatatccatttttattttaacttattctgtatctcgtataaaaatcaatcaggctggcatatcatgccaggaacatgtactatgctatcccaaatgacgaagcctgcatctataacctctcctaatactttcctttcctgccgtatatttccttcctccctccctttccgtatcgcaagatttccatcaaaggggagagaaaaagaaaagggaaaccaaaaaaaaaaaaaagactccgtcacacactctacacccgagtggacgagttttttttttctctgtgcgttgcaacttgtaaataccctactccgatgaacataaataaactggttgatgtcaatcggttattggtggatggaacatagctcccactttccttcgccgtcaatgagtttcagttccaacgaatggaagggaatcagagcaggcctttgtgaggatgtgatgactgttatgcccatgttggttgctagcctgtacagatgctcctcaacgtccacgcttgtggcattggtgcactcgtcgaggatgccatacttgggacagtgaaagaacagacgagccatccccagcctctgctgctctcccaaggatagagtatcttcccagttagtggtagcatcccaaccttctctctccagaagatacagcaagcgaacattctctagaatcgtcctcaggtgatcatccaacagctcggaagctgtagacttgtcacttgtttcgcctgagagcatcttcaactttgcctcctcgtgagagagagggtatatgatctgatccctcaaggttccaagacaagtatatggacgttgaggaacattaaaaattccttcagatggcttgctaagactaccagaagcaatgggccacaagcctcgaagcaccctaaagatggaactctttccgctaccatttggaccagtcacaagaaggcttttcccttgagatacatcacaagacagttggctagccaatagcttttgcgatggtgtcacaatgttcacgccacggaaggaaattatttcttcggaaccggcatttgtggcatcagaaggcatgacaggattgctttgtgatgcctgtagaagctcctcaagctcaaatatcctgttaataccaccagagagttcaaggaacttcttgtgtaactcaagaatatcaccaaacgctatgaagctttgtgacaccacagatgccaagaacctcagagcatgtgccaactctccttgagttgaagtcaaagctcggtctcccttgtgctccaaagcatataacatactcagcccccatgtcacgttatgaggaagctgtttcgtcacaaaatcatcaaaaataccataaagccacttctttctcaatagaaccttcgagtggttgagcaat

SEQ ID NO: 80 - DNA, 918 bp, Zea mays
ttcgctgtcgacgatttcgtttagagtgctcagggatctctggcccaccttctctgggagagttaccaagccctcagaagggatgtttcacgttcctcagcgcccatataccagcctaggtactctgcgggatcagatcatataccctctttcaagggaggaagcgaagataaaagttctttcgctacatagatctggtaacaattctagtgcctccatgctgctggatgatcacctgaagacaattctagagaatgttcggctggtgtatcttctagaaagggaagggtgggattctacaccaaactgggaagatgttctgtcgttaggagaacaacagaggcttggaatggctcgtttgtttttccatcatcctaagtttggtatcctggacgagtgcaccaatgctacgagtgttgatgtcgaagagcatctgtacagacttgcaactagcatgggcataactgtgatcacttcctctcaaaggcctgctttgatacccttccatgccttggagctgaagctcattgacggcgaagggaactgggagctatgtgcgatccagcagtgagtgatggtgcccattaggagttgatgccattaaatgcaccatcagctgcatgtacaaaagcaagcagctagcacattgccattgtttgtgtatggacaacgtagacagtggcagcgttgctatgttggaagatgctatattcttgtcatagtctgcctcaggttgagcagcaaagcattgtgatgatgtatgattgtgagccatgcatggtagctgaatcctgatattagcttttagatagtggacatgattgtgagccatgcatgatagctgaatagcagagcagaagggttgtgtgttagaagctgtacctattgattcattacattatattgattctgcgtagc

SEQ ID NO: 81 - DNA, 384 bp, Zea mays
cctctttcaagggaggaagcgaagataaaagttctttcgctacatagatctggtaacaattctagtgcctccatgctgctggatgatcacctgaagacaattctagagaatgttcggctggtgtatcttctagaaagggaagggtgggattctacaccaaactgggaagatgttctgtcgttaggagaacaacagaggcttggaatggctcgtttgtttttccatcatcctaagtttggtatcctggacgagtgcaccaatgctacgagtgttgatgtcgaagagcatctgtacagacttgcaactagcatgggcataactgtgatcacttcctctcaaaggcctgctttgatacccttccatgccttggagctgaagctcatt

SEQ ID NO: 82 - DNA, 411 bp, Zea mays
ttagagagctcagggatctctggtccaccttctctgggagagttactaagccctcagaagggatgattcacgttcctcagcgcccatataccagcctaggtactctgcgggatcagatcatataccctctttcgagggaggtagcgaagataaaagatctttcgctacatagatctggcaacaattctagtgcctccatgctgctgggtgatcacctgaagacaattctagcgaatgttcggatggcgtatcttctagaaagggaagggtgggattctacaccaaactgcgaagatgttctgtcgttaggagaacaacagaggcttgcaatggctcggttggttttccatcatcctaagtttggaatcctggacgagtgcaccaatgctacgagcgttgatgtcgaagagc

SEQ ID NO: 83 - DNA, 375 bp, Zea mays
ttgcaaaaaagatcgagctatggggacatcctgcataacaatatctcatcgaccagctttagttgcctttcatgatattgttttatccttggacggtgaaggtggttggaatgttcagcatagaagggatgattcgtccttttccaccgaagaatctgatttttcatcatcagaaactgatcgtaaatctgacgcactgactgttcaaagggcttttatgagcagggcaaagagcaatgcttcattggggtccaaggatcatccatattgtacagaggttatagcaacttcccctgaggtggaaatagaacatccagcacggacacctcgaattccacatttacgatgtcacccaagacctttgcctctcagagt

SEQ ID NO: 84 - DNA, 432 bp, Zea mays
agtgcaccaatgccacaagcgtggacgttgaggagcatctgtacaggctagcaaccaacatgggcataacagtcatcacatcctcacaaaggcctgctctgattcccttccattcgttggaactgaaactcattgacggcgaaggaaagtgggagctatgttccatccaccaataaccgattgccatcaaccagtttatttatgttcaccggagtagggtatttacaagttgcaacgacagaggaaaaaaaactcgtccactcgggtgtagagtgtgtgacggagctttttttttttttggtttcccttttcttttctttttctctcccctttgatggaaatcttgcgatacggaaagggagggaggaaggaaatatacggcaggaaaggaaagtattaggagaggttatagatgcaggcttcgtcatttgg

SEQ ID NO: 85 - DNA, 1482 bp, Brassica napus
  CDS (239)..(1351)
ggaactgggtgttgaataagcatctggaagagaaagaagattgccgcagtggactgttaaaaaagagaaacagagggtgaaggataattttatgattgtagatagtgttatagcagccaatttcgccacgtaacacagtctcattcattctcacgactctctctctggtgaactgcgatgatcaaatctcgaactttcgagattgcgaaataataatctgagtgtgacccttatatccatggcaatctctcttcttcccagacccttcatatcgctccgtacaagcaaaagcttcaacctttcaccgagggttttctcccttaggctatcatgctcctcttcttctaatgggtctgccggaaaccagcaggtttcttcgaatccagagaagagatccttcgctgctgccaccggtgatatgttcatcggagtcgcgtcgaggcttttgaaaaggtccaatcaacggacgcctccgagtgatgagggagaaagaataggaacagtaattgaagatgaggttgatccagagatgatatgggaacaaagggttaaagacgtggaggctgagaaagagaggagggtcattacaagccccggttttagcttctctgccgctggtcttttgttcccttatcatcttggtgttgctcagcttctcatcgagaagggttacatcaaggacactactcctttggcaggagcttctgctggtgctatagtatgtgctacaataacctcaggagcatcaatgcaagaagcccttgaagctaccaaggttcttgctcatgattgccgacgcaatggcactgcttttcgtcttggggctgtgctcagagagtctatggagaaattactaccggatgatattcatattaggtccaatggcagagttcgtgttgccatcacacaggtgctatggaaacctagaggtttactggtggatcaattcgactccaaaagcgaccttataaatgcagttaatacatctgcatttataccaggataccttgcaccaaggcctgcaaccatgttccgtaatcgagtttgtgttgatggaggcttgacattgtttatgccaccaaccgctgctgctaaaacagttcaagtttgtgcgttttccgcgagtaacttcaaactaaagggtattgggatcagcccagactgcaaccctctaaacaaggcaaccgcaagacaactattgaaatgggcactggagccagcagaagacgaggtgttagagaagctgtttgagctaggatacgcagatgcagctacctggtctgagatgaatccagtggatgaactggtctatgatgatactcctgcagctcaagcgattcaagctagttagaaattacaagaattcagtacttaatttattttaactaaaaatagtctgtttattgcgctataatagtagattaatacttttcccacaaggagacttttgtaatcaaaacaaaatccagtggtagataagag

SEQ ID NO: 86 - protein, 370 aa, Brassica napus
MAISLLPRPFISLRTSKSFNLSPRVFSLRLSCSSSSNGSAGNQQVSSNPEKRSFAAATGDMFIGVASRLLKRSNQRTPPSDEGERIGTVIEDEVDPEMIWEQRVKDVEAEKERRVITSPGFSFSAAGLLFPYHLGVAQLLIEKGYIKDTTPLAGASAGAIVCATITSGASMQEALEATKVLAHDCRRNGTAFRLGAVLRESMEKLLPDDIHIRSNGRVRVAITQVLWKPRGLLVDQFDSKSDLINAVNTSAFIPGYLAPRPATMFRNRVCVDGGLTLFMPPTAAAKTVQVCAFSASNFKLKGIGISPDCNPLNKATARQLLKWALEPAEDEVLEKLFELGYADAATWSEMNPVDELVYDDTPAAQAIQAS

SEQ ID NO: 87 - DNA, 1932 bp, Glycine max
  CDS (251)..(1474)
gtttgaatgtgcttcaaatacttgaaaccccatgatctctattcaatataactaatttgaggagttaagataacatgatggctaagaaaatggattctgactttctctgatcatctgagaagatacaaaaagttaaaagagcattctggataggtgaacttaggccggtttgagtggatgacataatttaaaataattatgcactctgttatgtttcaattcagatgtgactaaatagatatgatttatcatgtttatatattgtctcatttcaaccgggtcagggtcaaggatgggtcccagtatcttttcctcccatgctcattctcaccgtctcccctatgcagcaaatcttaaccctaattcctctcttctccgtcgacgcgcacaattcatcagcttcgcctccaattcttctccacctcagcctcggcctcagggagggttcaaagacgaggaggccactgccaagaaatcgtttgccgtggcgaccggcgagctgtttctagggctggcgacgcgcctgattaagagccgaaacaagggaagcagcagcctcgcagaagattcgggttcggtgggcatgtttgagaataattctgaggagagaatcggagcggtggtggaggacgagattgatcccgacgtggtttgggagcaaagagtgaaagacgtggaggcggagcgcaataggtatagccgcctcgtcaccagccctggctttagtttctctgccgctggacttctcttcccttaccatcttggtgtcgctcaatttctcattcaaaatggttacattaaggaaacaacaccgttagccggttcctcagctggagctatagtttgtgctgtgattgcttccggagctagtatggaagaagccttgaatgctactaaaatattggctgaagattgccgcaatcgggggactgcattccggcttggggctgttctacgtgatattcttgacaagtttttgcctgatgatgttcatataagatctaatggaagagttcgagttgctgtgacacagcttctttggagacccaggggtttgttggtagatcagtttgattccaaggaagatctcatcaatgcagtttttacctcttcctttattccaggatatcttgcaccaaggccagcaacgatgtttcgtaatcgactatgcattgatgggggtttgacattgtttatgccaccgacatctgctgcacaaacggttcgtgtttgtgcttttccagcaagtcgattgggattgcaagggataggaattagtccagactgcaatcctgaaaacgtgtgtagcccacgacagcttttcaactgggcacttgaaccagccgaagatgcaattcttgaccgattctttgagcttggatatctagatgcttctgtctgggcaaaggaaaacccagttgaagtaatagttcaagatgatagtcctgcgtttggaagtagcagtgcgacatagattgatgatataatgaactacgtaaagatagttcattatgcagattgaagatgcatgaggaaactacagaccattgaatcaacgatgtttccttgaaatggagcatcaaattaggaaaaattcacggggagaagtccataattaatctcgtttattcatatttattgtacattgcaatagaattagaggaaaggaaagaaagaaaatagttgagaggtaatatatttaaaatttactagccagaaggttcatgttgttggaaatttatagtgaatcataaatagaatttattgctagtttccctgtgcatgacaaagttatggtaatttagtttctcgaatgtgacatcttttgtttactggagagagtggggttgatcagttaaatgagatcattaaagtcttgggaacactcaccaaacaagaattaaggtgcatgagatcaaactacaatgaatt

SEQ ID NO: 88 - protein, 407 aa, Glycine max
MFIYCLISTGSGSRMGPSIFSSHAHSHRLPYAANLNPNSSLLRRRAQFISFASNSSPPQPRPQGGFKDEEATAKKSFAVATGELFLGLATRLIKSRNKGSSSLAEDSGSVGMFENNSEERIGAVVEDEIDPDVVWEQRVKDVEAERNRYSRLVTSPGFSFSAAGLLFPYHLGVAQFLIQNGYIKETTPLAGSSAGAIVCAVIASGASMEEALNATKILAEDCRNRGTAFRLGAVLRDILDKFLPDDVHIRSNGRVRVAVTQLLWRPRGLLVDQFDSKEDLINAVFTSSFIPGYLAPRPATMFRNRLCIDGGLTLFMPPTSAAQTVRVCAFPASRLGLQGIGISPDCNPENVCSPRQLFNWALEPAEDAILDRFFELGYLDASVWAKENPVEVIVQDDSPAFGSSSAT

SEQ ID NO: 89 - DNA, 487 bp, Helianthus annuus
  CDS (3)..(485)
cgacgatttcgtcgaaggcggttacgagccccgggtttaggttttcggctgccggattgttgtttccttatcatcttggtgttgctaagtttctaattgagaaaggttacattaaggatacaacgcccttggctggttcatcagctggtgcgatagtatgtgcagtagttgcatcaggagcaagcatggaagaggctttagaagctacaaaagttttggcgcaagattgccgaagtagagggactgcatttcgtcttggggctgttctcagagatgttcttgaacaatttctacctgatgatgctcatataaggtctaatgggcgggttagagttgctgtaacacaaattctatggaggcctagaggtttactggttgatcaatttgattccagggaagatctcataaatgcagtaattacatcttcattcattcctggatatcttgctccaagaccggcaatcttgttcagaaaccgactctgtgt

SEQ ID NO: 90 - protein, 161 aa, Helianthus annuus
TISSKAVTSPGFRFSAAGLLFPYHLGVAKFLIEKGYIKDTTPLAGSSAGAIVCAVVASGASMEEALEATKVLAQDCRSRGTAFRLGAVLRDVLEQFLPDDAHIRSNGRVRVAVTQILWRPRGLLVDQFDSREDLINAVITSSFIPGYLAPRPAILFRNRLC

SEQ ID NO: 91 - DNA, 430 bp, Linum usitatissimum
  CDS (2)..(430)
atttcgtcgtctagcttcggttccttctgctggtgccatagtctgtgcagttattgcctccggtgctactatgcaggaggctttacaactcaccaaaaccctggcagaagattgccggcttaagggcacggcattccggcttggggcggttctcagagatgtgcttgaaaagtttcttcctgatgatgttcacattcgatccaatgggagggttcgagttgctgtaacacaaattctctggcgacctaggggtttgctagtggatcagttcaactcaaaggaagacctcataaatgcagtttttacatcttcctttattccaggctatcttgctccaaggcctgccactatgttccggaagcgactttgtgttgaagggggcttgacattgtttatgccaccaacatctgctgataagacgattcgtgta

SEQ ID NO: 92 - protein, 143 aa, Linum usitatissimum
FRRLASVPSAGAIVCAVIASGATMQEALQLTKTLAEDCRLKGTAFRLGAVLRDVLEKFLPDDVHIRSNGRVRVAVTQILWRPRGLLVDQFNSKEDLINAVFTSSFIPGYLAPRPATMFRKRLCVEGGLTLFMPPTSADKTIRV

SEQ ID NO: 93 - protein, 142 aa, Artificial sequence
  consensus sequence
  Variant (141)..(141): Xaa in position 141 is His or Pro
  Variant (142)..(142): Xaa in position 142 is Arg or Gly
NVDPFSIGPTSILGRTIAFRVLFCKSMLQLRRDLFRFLLHWFLTLKLAVSPFVSWFHPRNPQGILAVVTIIAFVLKRYTNVKAKAEMAYRRKFWRNMMRAALTYEEWAHAAKMLDKETPKMNESDLYDEELVKNKLMELRXX

SEQ ID NO: 94 - protein, 46 aa, Artificial sequence
  consensus sequence
  Variant (12)..(12): Xaa in position 12 is Arg or Lys
  Variant (13)..(13): Xaa in position 13 is His or Leu
  Variant (14)..(14): Xaa in position 14 is Asn or Ile
  Variant (22)..(22): Xaa in position 22 is Ser or Thr
  Variant (30)..(30): Xaa in position 30 is Asn or Asp
  Variant (31)..(31): Xaa in position 31 is Asn or Ser
  Variant (32)..(32): Xaa in position 32 is Ser or Asp
  Variant (33)..(33): Xaa in position 33 is Glu or Ser
  Variant (34)..(34): Xaa in position 34 is Ser or no amino acid
  Variant (35)..(35): Xaa in position 35 is Leu or no amino acid
  Variant (37)..(37): Xaa in position 37 is Asp or Glu
  Variant (41)..(41): Xaa in position 41 is Asp or Glu
  Variant (45)..(45): Xaa in position 45 is Ser or Ala
  Variant (46)..(46): Xaa in position 46 is Phe or Asp
PELHKGRLQVPXXXKEYIDEVXTQLRMVCXXXXXXEXLSLXEKLXX

SEQ ID NO: 95 - protein, 98 aa, Artificial sequence
  consensus sequence
  Variant (1)..(1): Xaa in position 1 is Phe or Ser
  Variant (7)..(7): Xaa in position 7 is Arg or Lys
  Variant (15)..(15): Xaa in position 15 is Leu or Met
  Variant (28)..(28): Xaa in position 28 is Ile or Met
  Variant (30)..(30): Xaa in position 30 is Ser or Ala
  Variant (34)..(34): Xaa in position 34 is Ser or Thr
  Variant (36)..(36): Xaa in position 36 is Ser or Thr
  Variant (46)..(46): Xaa in position 46 is Asn or Asp
  Variant (48)..(48): Xaa in position 48 is Leu or Trp
  Variant (57)..(57): Xaa in position 57 is Leu or Met
  Variant (59)..(59): Xaa in position 59 is Ser or Gly
  Variant (60)..(60): Xaa in position 60 is Val or Ile
  Variant (62)..(62): Xaa in position 62 is Thr or Ala
  Variant (63)..(63): Xaa in position 63 is Ile or Val
  Variant (68)..(68): Xaa in position 68 is Met or Thr
  Variant (70)..(70): Xaa in position 70 is Gln or Leu
  Variant (73)..(73): Xaa in position 73 is Leu or Val
  Variant (75)..(75): Xaa in position 75 is Asp or Glu
  Variant (81)..(81): Xaa in position 81 is Cys or Met
  Variant (85)..(85): Xaa in position 85 is Asn or His
  Variant (88)..(88): Xaa in position 88 is Cys or Ser
  Variant (98)..(98): Xaa in position 98 is Leu or Met
XHVGVVXTLVEHKLXPRIIAGSSVGSIXCXVVAXRXWPELQSFFEXSXHSLQFFDQXGXXFXXVKRVXTXGAXHXIRQLQXMLRXLTXNLTFQEAYDX

SEQ ID NO: 96 - protein, 71 aa, Artificial sequence
  consensus sequence
  Variant (1)..(1): Xaa in position 1 is Val or Ile
  Variant (10)..(10): Xaa in position 10 is Glu or Gly
  Variant (15)..(15): Xaa in position 15 is Gly or no amino acid
  Variant (16)..(16): Xaa in position 16 is Asp or no amino acid
  Variant (17)..(17): Xaa in position 17 is Lys or Ser
  Variant (18)..(18): Xaa in position 18 is Ser, Ala or Thr
  Variant (19)..(19): Xaa in position 19 is Ser or Pro
  Variant (20)..(20): Xaa in position 20 is Thr or Ala
  Variant (30)..(30): Xaa in position 30 is Val or Ile
  Variant (63)..(63): Xaa in position 63 is Asp or Glu
  Variant (64)..(64): Xaa in position 64 is Ile or Phe
  Variant (67)..(67): Xaa in position 67 is Ala or Thr
  Variant (71)..(71): Xaa in position 71 is Arg or Asn
XPYHPPFNLXPEEGXXXXXXRRWRDGSLEXDLPMMQLKELFNVNHFIVSQANPHIAPLLRLKXXVRXYGGX

SEQ ID NO: 97 - protein, 57 aa, Artificial sequence
  consensus sequence
  Variant (14)..(14): Xaa in position 14 is Ala or Val
  Variant (25)..(25): Xaa in position 25 is Ser or Ile
  Variant (30)..(30): Xaa in position 30 is Ser or Ala
  Variant (31)..(31): Xaa in position 31 is Thr or Ser
  Variant (34)..(34): Xaa in position 34 is Ser or His
  Variant (35)..(35): Xaa in position 35 is Ser or no amino acid
  Variant (36)..(37): Xaa in position 36 to 37 is His or no amino acid
  Variant (40)..(40): Xaa in position 40 is Ala or Ser
  Variant (43)..(43): Xaa in position 43 is Thr or Val
  Variant (46)..(46): Xaa in position 46 is Asn or Ser
  Variant (49)..(49): Xaa in position 49 is Arg or Lys
  Variant (52)..(52): Xaa in position 52 is Pro or Thr
  Variant (56)..(56): Xaa in position 56 is Val or Cys
ANCGIELALDECVXILNHMRRLKRXAERAXXASXXXXGLXSTXRFXASXRIXSWNXI

SEQ ID NO: 98 - protein, 50 aa, Artificial sequence
  consensus sequence
  Variant (1)..(1): Xaa in position 1 is Glu or Asp
  Variant (4)..(4): Xaa in position 4 is Thr or Val
  Variant (5)..(5): Xaa in position 5 is Asp or Thr
  Variant (6)..(6): Xaa in position 6 is Val or Asp
  Variant (7)..(7): Xaa in position 7 is Ala or Ser
  Variant (8)..(8): Xaa in position 8 is Ala or Asn
  Variant (9)..(9): Xaa in position 9 is Ser or Asn
  Variant (10)..(10): Xaa in position 10 is Lys or Asn
  Variant (11)..(11): Xaa in position 11 is His or Asn
  Variant (12)..(12): Xaa in position 12 is Gln or Leu
  Variant (13)..(13): Xaa in position 13 is Gly or His
  Variant (14)..(14): Xaa in position 14 is Ile or Ala
  Variant (15)..(15): Xaa in position 15 is Ser or Gly
  Variant (16)..(17): Xaa in position 16 to 17 is Ser or no amino acid
  Variant (18)..(18): Xaa in position 18 is Cys or no amino acid
  Variant (19)..(19): Xaa in position 19 is Gly or no amino acid
  Variant (20)..(20): Xaa in position 20 is Thr or no amino acid
  Variant (21)..(21): Xaa in position 21 is Asn or no amino acid
  Variant (22)..(22): Xaa in position 22 is Gly or no amino acid
  Variant (23)..(23): Xaa in position 23 is Lys or no amino acid
  Variant (24)..(24): Xaa in position 24 is Thr or no amino acid
  Variant (25)..(25): Xaa in position 25 is Trp or no amino acid
  Variant (26)..(26): Xaa in position 26 is Lys or no amino acid
  Variant (27)..(27): Xaa in position 27 is Thr or no amino acid
  Variant (28)..(28): Xaa in position 28 is Tyr or no amino acid
  Variant (30)..(30): Xaa in position 30 is Gly or no amino acid
  Variant (31)..(31): Xaa in position 31 is Ile or no amino acid
  Variant (32)..(32): Xaa in position 32 is Leu or no amino acid
  Variant (33)..(33): Xaa in position 33 is Asp or Asn
  Variant (34)..(34): Xaa in position 34 is Gly or Leu
  Variant (38)..(38): Xaa in position 38 is Asp or Glu
  Variant (39)..(39): Xaa in position 39 is Ser or Thr
  Variant (41)..(41): Xaa in position 41 is Ser or Ile
  Variant (43)..(43): Xaa in position 43 is Asp or Glu
  Variant (44)..(44): Xaa in position 44 is Leu or Met
  Variant (45)..(45): Xaa in position 45 is His or Ser
  Variant (50)..(50): Xaa in position 50 is Ser or Thr
XDLXXXXXXXXXXXXXXXXXXXXXXXXXRXXXXXSDSXXEXVXXXSWTRX

SEQ ID NO: 99 - protein, 66 aa, Artificial sequence
  consensus sequence
  Variant (1)..(1): Xaa in position 1 is Arg or Met
  Variant (3)..(3): Xaa in position 3 is Thr or Val
  Variant (6)..(6): Xaa in position 6 is Val or Leu
  Variant (7)..(7): Xaa in position 7 is His or Gln
  Variant (8)..(8): Xaa in position 8 is Gly or Asn
  Variant (13)..(13): Xaa in position 13 is Ile or Thr
  Variant (14)..(14): Xaa in position 14 is Thr, Ala or Asp
  Variant (15)..(15): Xaa in position 15 is Leu or Gln
  Variant (16)..(16): Xaa in position 16 is Thr or Asn
  Variant (17)..(17): Xaa in position 17 is Arg or Asn
  Variant (18)..(18): Xaa in position 18 is Gly or Lys
  Variant (19)..(19): Xaa in position 19 is Phe or Gly
  Variant (20)..(20): Xaa in position 20 is Thr or Leu
  Variant (21)..(21): Xaa in position 21 is Ser or Val
  Variant (23)..(23): Xaa in position 23 is Pro or Arg
  Variant (24)..(24): Xaa in position 24 is Asn or Ala
  Variant (25)..(25): Xaa in position 25 is Ser or Asn
  Variant (27)..(27): Xaa in position 27 is Ala or Asn
  Variant (28)..(28): Xaa in position 28 is Val or Asp
  Variant (29)..(29): Xaa in position 29 is Pro or Phe
  Variant (30)..(30): Xaa in position 30 is Gly or Gln
  Variant (31)..(31): Xaa in position 31 is Pro or Tyr
  Variant (32)..(32): Xaa in position 32 is Val or Arg
  Variant (35)..(35): Xaa in position 35 is Ser or Arg
  Variant (36)..(36): Xaa in position 36 is Phe or Leu
  Variant (37)..(37): Xaa in position 37 is Ser or Ala
  Variant (38)..(38): Xaa in position 38 is Pro or Thr
  Variant (39)..(39): Xaa in position 39 is Arg or Leu
  Variant (40)..(40): Xaa in position 40 is Ser or Asp
  Variant (42)..(42): Xaa in position 42 is Ser or Asn
  Variant (43)..(43): Xaa in position 43 is Leu or Ser
  Variant (44)..(44): Xaa in position 44 is Ala or Asp
  Variant (45)..(45): Xaa in position 45 is Ala or Ser
  Variant (46)..(46): Xaa in position 46 is Gln or Thr
  Variant (47)..(47): Xaa in position 47 is Ser or Glu
  Variant (48)..(48): Xaa in position 48 is Glu or Ser
  Variant (49)..(49): Xaa in position 49 is Ser or Glu
  Variant (50)..(50): Xaa in position 50 is Glu or Pro
  Variant (51)..(51): Xaa in position 51 is Ser or Arg
  Variant (52)..(52): Xaa in position 52 is Asp or Glu
  Variant (53)..(53): Xaa in position 53 is Lys or Ile
  Variant (54)..(54): Xaa in position 54 is Arg or Gly
  Variant (55)..(55): Xaa in position 55 is Glu or Asn
  Variant (56)..(56): Xaa in position 56 is Ser or Arg
  Variant (57)..(57): Xaa in position 57 is Val or no amino acid
  Variant (58)..(58): Xaa in position 58 is Ser or Phe
  Variant (60)..(60): Xaa in position 60 is Ser or Val
  Variant (64)..(64): Xaa in position 64 is Thr or Leu
  Variant (66)..(66): Xaa in position 66 is Ser or Thr
XFXDFXXXLDVDXXXXXXXXXSXXXPXXXXXXSPXXXXXXRXXXXXXXXXXXXXXXXXNXSSIXVX

SEQ ID NO: 100 - protein, 94 aa, Artificial sequence
  consensus sequence
  Variant (1)..(1): Xaa in position 1 is Ile or Thr
  Variant (2)..(2): Xaa in position 2 is His or Ser
  Variant (5)..(5): Xaa in position 5 is Ile or Phe
  Variant (7)..(7): Xaa in position 7 is Phe or Leu
  Variant (11)..(12): Xaa in position 11 to 12 is Lys or Arg
  Variant (14)..(14): Xaa in position 14 is Asp or Asn
  Variant (16)..(16): Xaa in position 16 is Ser or Gly
  Variant (17)..(17): Xaa in position 17 is Pro or Met
  Variant (18)..(18): Xaa in position 18 is Pro or Leu
  Variant (19)..(19): Xaa in position 19 is Ser or no amino acid
  Variant (20)..(20): Xaa in position 20 is Gly or no amino acid
  Variant (21)..(22): Xaa in position 21 to 22 is Ser or no amino acid
  Variant (23)..(23): Xaa in position 23 is His or no amino acid
  Variant (24)..(24): Xaa in position 24 is Asp or no amino acid
  Variant (25)..(25): Xaa in position 25 is Phe or Val
  Variant (26)..(26): Xaa in position 26 is Glu or Gly
  Variant (28)..(28): Xaa in position 28 is Tyr or Gln
  Variant (29)..(29): Xaa in position 29 is Asn or Ser
  Variant (30)..(30): Xaa in position 30 is Ile or Gly
  Variant (32)..(32): Xaa in position 32 is Val or Leu
  Variant (33)..(33): Xaa in position 33 is Ala or Pro
  Variant (35)..(35): Xaa in position 35 is Cys or Ser
  Variant (38)..(38): Xaa in position 38 is Asp or Ile
  Variant (39)..(39): Xaa in position 39 is Glu or Asp
  Variant (40)..(40): Xaa in position 40 is Cys or Ile
  Variant (42)..(42): Xaa in position 42 is Gly or Glu
  Variant (43)..(43): Xaa in position 43 is Lys or Arg
  Variant (45)..(45): Xaa in position 45 is Ile or Met
  Variant (47)..(47): Xaa in position 47 is Ala or Asn
  Variant (48)..(48): Xaa in position 48 is Ala or Ser
  Variant (50)..(50): Xaa in position 50 is Ser or Val
  Variant (51)..(51): Xaa in position 51 is Ala or Ser
  Variant (52)..(52): Xaa in position 52 is Ser or Glu
  Variant (53)..(53): Xaa in position 53 is Glu or His
  Variant (54)..(54): Xaa in position 54 is His or Glu
  Variant (55)..(55): Xaa in position 55 is Gly or Asp
  Variant (57)..(57): Xaa in position 57 is Asp or Asn
  Variant (58)..(59): Xaa in position 58 to 59 is Glu or Asp
  Variant (60)..(60): Xaa in position 60 is Ser or Asp
  Variant (61)..(61): Xaa in position 61 is Thr or Asp
  Variant (62)..(62): Xaa in position 62 is Val or Asp
  Variant (63)..(63): Xaa in position 63 is Ala or Glu
  Variant (64)..(64): Xaa in position 64 is Arg or Glu
  Variant (65)..(65): Xaa in position 65 is Ser or Glu
  Variant (67)..(67): Xaa in position 67 is Ser or no amino acid
  Variant (68)..(68): Xaa in position 68 is Gly or no amino acid
  Variant (69)..(70): Xaa in position 69 to 70 is Ser or no amino acid
  Variant (71)..(71): Xaa in position 71 is His or no amino acid
  Variant (72)..(72): Xaa in position 72 is Asp or no amino acid
  Variant (73)..(73): Xaa in position 73 is Thr or Glu
  Variant (74)..(74): Xaa in position 74 is Glu or His
  Variant (75)..(75): Xaa in position 75 is Thr or Lys
  Variant (76)..(76): Xaa in position 76 is Gln or Gly
  Variant (77)..(77): Xaa in position 77 is Asp or Ser
  Variant (78)..(78): Xaa in position 78 is Tyr or Val
  Variant (79)..(79): Xaa in position 79 is Asn or Pro
  Variant (80)..(80): Xaa in position 80 is Ser or Val
  Variant (81)..(81): Xaa in position 81 is Met or Lys
  Variant (83)..(83): Xaa in position 83 is His or Ser
  Variant (84)..(84): Xaa in position 84 is His or Gly
  Variant (85)..(85): Xaa in position 85 is Ser or Leu
  Variant (86)..(86): Xaa in position 86 is Gly or Gln
  Variant (87)..(87): Xaa in position 87 is Met or Asp
  Variant (88)..(88): Xaa in position 88 is Asp or Ser
  Variant (89)..(89): Xaa in position 89 is Gln or Cys
  Variant (91)..(91): Xaa in position 91 is Ile or Val
  Variant (92)..(92): Xaa in position 92 is Val or Ile
  Variant (94)..(94): Xaa in position 94 is Ser or Ala
XXNGXVXNVVXXEXLXXXXXXXXXXXNXXXEXXEXVQXXXPXXEXDXXSXXXXXXDXXXXXXXXXLXXXXXXXXXXXXXXXDXXXXXXXSXXDX

SEQ ID NO: 101 - protein, 34 aa, Artificial sequence
  consensus sequence
  Variant (32)..(32): Xaa in position 32 is Ile or Met
  Variant (34)..(34): Xaa in position 34 is Cys or Phe
MNESDLYDEELVKNKLMELRHRRHEGSLRDIXFX

SEQ ID NO: 102 - protein, 27 aa, Artificial sequence
  consensus sequence
VRNFRVDDFEDTRDNGLLTDEALAASV

SEQ ID NO: 103 - protein, 12 aa, Artificial sequence
  consensus sequence
  Variant (1)..(1): Xaa in position 1 is Leu or Thr
  Variant (6)..(6): Xaa in position 6 is Val or Asn
  Variant (7)..(7): Xaa in position 7 is Asp or Pro
  Variant (8)..(8): Xaa in position 8 is Asp or Ser
  Variant (9)..(9): Xaa in position 9 is Phe or Tyr
  Variant (10)..(10): Xaa in position 10 is Val or Gly
XKIIQXXXXXEL

SEQ ID NO: 104 - protein, 57 aa, Artificial sequence
  consensus sequence
  Variant (18)..(18): Xaa in position 18 is Thr or Val
  Variant (19)..(19): Xaa in position 19 is Asn or Ile
  Variant (27)..(27): Xaa in position 27 is Asn or Lys
  Variant (29)..(29): Xaa in position 29 is Ser or Ile
  Variant (35)..(35): Xaa in position 35 is Ala or Ser
  Variant (37)..(37): Xaa in position 37 is Ala or Ser
  Variant (38)..(38): Xaa in position 38 is Gly or His
  Variant (39)..(39): Xaa in position 39 is Thr or Gly
  Variant (40)..(40): Xaa in position 40 is Ser or Leu
  Variant (42)..(43): Xaa in position 42 to 43 is Ser or no amino acid
  Variant (44)..(45): Xaa in position 44 to 45 is His or no amino acid
  Variant (46)..(46): Xaa in position 46 is Gly or no amino acid
  Variant (47)..(47): Xaa in position 47 is Leu or no amino acid
  Variant (48)..(48): Xaa in position 48 is Ala or no amino acid
  Variant (51)..(51): Xaa in position 51 is Thr or Val
  Variant (54)..(54): Xaa in position 54 is Asn or Ser
  Variant (57)..(57): Xaa in position 57 is Arg or Lys
SAIKANCGIELALDECVXXLNHMRRLXRXAERAAXAXXXXSXXXXXXXSTXRFXASX

SEQ ID NO: 105 - protein, 56 aa, Artificial sequence
  consensus sequence
  Variant (3)..(3): Xaa in position 3 is Ile or Thr
  Variant (4)..(4): Xaa in position 4 is Ala or Asp
  Variant (5)..(5): Xaa in position 5 is Leu or Gln
  Variant (6)..(6): Xaa in position 6 is Thr or Asn
  Variant (7)..(7): Xaa in position 7 is Arg or Asn
  Variant (8)..(8): Xaa in position 8 is Gly or Lys
  Variant (9)..(9): Xaa in position 9 is Phe or Gly
  Variant (10)..(10): Xaa in position 10 is Thr or Leu
  Variant (11)..(11): Xaa in position 11 is Ser or Val
  Variant (13)..(13): Xaa in position 13 is Pro or Arg
  Variant (14)..(14): Xaa in position 14 is Asn or Ala
  Variant (15)..(15): Xaa in position 15 is Ser or Asn
  Variant (17)..(17): Xaa in position 17 is Ala or Asn
  Variant (18)..(18): Xaa in position 18 is Val or Asp
  Variant (19)..(19): Xaa in position 19 is Pro or Phe
  Variant (20)..(20): Xaa in position 20 is Gly or Gln
  Variant (21)..(21): Xaa in position 21 is Pro or Tyr
  Variant (22)..(22): Xaa in position 22 is Val or Arg
  Variant (25)..(25): Xaa in position 25 is Ser or Arg
  Variant (26)..(26): Xaa in position 26 is Phe or Leu
  Variant (27)..(27): Xaa in position 27 is Ser or Ala
  Variant (28)..(28): Xaa in position 28 is Pro or Thr
  Variant (29)..(29): Xaa in position 29 is Arg or Leu
  Variant (30)..(30): Xaa in position 30 is Ser or Asp
  Variant (32)..(32): Xaa in position 32 is Asn or no amino acid
  Variant (34)..(34): Xaa in position 34 is Leu or Asp
  Variant (35)..(35): Xaa in position 35 is Ala or Ser
  Variant (36)..(36): Xaa in position 36 is Ala or Thr
  Variant (37)..(37): Xaa in position 37 is Gln or Glu
  Variant (40)..(40): Xaa in position 40 is Ser or Pro
  Variant (41)..(41): Xaa in position 41 is Glu or Arg
  Variant (42)..(42): Xaa in position 42 is Ser or Glu
  Variant (43)..(43): Xaa in position 43 is Asp or Ile
  Variant (44)..(44): Xaa in position 44 is Lys or Gly
  Variant (45)..(45): Xaa in position 45 is Arg or Asn
  Variant (46)..(46): Xaa in position 46 is Glu or Arg
  Variant (47)..(47): Xaa in position 47 is Ser or Val
  Variant (48)..(48): Xaa in position 48 is Ser or Phe
  Variant (50)..(50): Xaa in position 50 is Ser or Val
  Variant (54)..(54): Xaa in position 54 is Ser or Leu
  Variant (55)..(55): Xaa in position 55 is Ala or Val
VDXXXXXXXXXSXXXPXXXXXXSPXXXXXXRXSXXXXSEXXXXXXXXXNXSSIXXT

SEQ ID NO: 106 - protein, 44 aa, Artificial sequence
  consensus sequence
  Variant (1)..(1): Xaa in position 1 is Pro or Leu
  Variant (2)..(2): Xaa in position 2 is Val or Ser
  Variant (3)..(3): Xaa in position 3 is Gly or no amino acid
  Variant (4)..(5): Xaa in position 4 to 5 is Ser or no amino acid
  Variant (6)..(6): Xaa in position 6 is His or no amino acid
  Variant (7)..(7): Xaa in position 7 is Asp or no amino acid
  Variant (8)..(8): Xaa in position 8 is Phe or no amino acid
  Variant (11)..(11): Xaa in position 11 is Gln or Tyr
  Variant (12)..(12): Xaa in position 12 is Ser or Asn
  Variant (13)..(13): Xaa in position 13 is Gly or Ile
  Variant (15)..(15): Xaa in position 15 is Leu or Val
  Variant (16)..(16): Xaa in position 16 is Pro or Ala
  Variant (18)..(18): Xaa in position 18 is Ser or Cys
  Variant (21)..(21): Xaa in position 21 is Ile or Asp
  Variant (22)..(22): Xaa in position 22 is Asp or Glu
  Variant (23)..(23): Xaa in position 23 is Ile or Cys
  Variant (25)..(25): Xaa in position 25 is Glu or Gly
  Variant (26)..(26): Xaa in position 26 is Arg or Lys
  Variant (28)..(28): Xaa in position 28 is Met or Ile
  Variant (30)..(30): Xaa in position 30 is Asn or Ala
  Variant (31)..(31): Xaa in position 31 is Ser or Ala
  Variant (33)..(33): Xaa in position 33 is Val or Ser
  Variant (34)..(34): Xaa in position 34 is Ser or Ala
  Variant (35)..(35): Xaa in position 35 is Gly or Ser
  Variant (36)..(36): Xaa in position 36 is His or Glu
  Variant (37)..(37): Xaa in position 37 is Glu or His
  Variant (38)..(38): Xaa in position 38 is Asp or Gly
  Variant (40)..(40): Xaa in position 40 is Asn or Asp
  Variant (41)..(42): Xaa in position 41 to 42 is Asp or Glu
  Variant (43)..(43): Xaa in position 43 is Asn or Ser
  Variant (44)..(44): Xaa in position 44 is Asp or Thr
XXXXXXXXENXXXEXXEXVQXXXPXXEXDXXSXXXXXXDXXXXX

SEQ ID NO: 107 - protein, 25 aa, Artificial sequence
  consensus sequence
ITSILLFFFYTIIVASSEPSCRPYK

SEQ ID NO: 108 - protein, 25 aa, Artificial sequence
  consensus sequence
HPPQAAFLPYGETFFNAPTGRNSDG

SEQ ID NO: 109 - protein, 43 aa, Artificial sequence
  consensus sequence
LIEKGIVSDFTNVSLSVQLNTFKQILPTLCASSSHDCRKMLED

SEQ ID NO: 110 - protein, 26 aa, Artificial sequence
  consensus sequence
TAKEKEYDPFTGCLPWLNEFGKNHDE

SEQ ID NO: 111 - protein, 33 aa, Artificial sequence
  consensus sequence
MAHGILNGPYATPAFNWSCLDAASVDNESSFGS

SEQ ID NO: 112 - protein, 8 aa, Artificial sequence
  consensus sequence
  Variant (3)..(3): Xaa in position 3 is Ser, Thr or Pro
  Variant (5)..(5): Xaa in position 5 is Thr, Ser or Gly
  Variant (8)..(8): Xaa in position 8 is Thr or Leu
GYXCXEHX

SEQ ID NO: 113 - protein, 15 aa, Artificial sequence
  consensus sequence
  Variant (1)..(1): Xaa in position 1 is Val or Ile
  Variant (2)..(2): Xaa in position 2 is Ala, Ser or Arg
  Variant (3)..(3): Xaa in position 3 is Ser or Met
  Variant (4)..(4): Xaa in position 4 is Pro, Ser, Gly or Arg
  Variant (5)..(5): Xaa in position 5 is Ala, Ser, Glu or Asn
  Variant (6)..(6): Xaa in position 6 is Gln, Ser or Gly
  Variant (7)..(7): Xaa in position 7 is Asn, Leu or no amino acid
  Variant (8)..(8): Xaa in position 8 is Leu, Arg, Ile or no amino acid
  Variant (9)..(9): Xaa in position 9 is Thr, Leu, Ser or no amino acid
  Variant (10)..(10): Xaa in position 10 is Leu, Arg, Ser or no amino acid
  Variant (11)..(11): Xaa in position 11 is Gln, Asn, Ile or no amino acid
  Variant (12)..(12): Xaa in position 12 is Asp or no amino acid
  Variant (13)..(13): Xaa in position 13 is Gly or no amino acid
  Variant (14)..(14): Xaa in position 14 is Glu or no amino acid
  Variant (15)..(15): Xaa in position 15 is Arg or Tyr
XXXXXXXXXXXXXXX

SEQ ID NO: 114 - protein, 72 aa, Artificial sequence
  consensus sequence
  Variant (1)..(1): Xaa in position 1 is Gly or Ala
  Variant (3)..(3): Xaa in position 3 is Val or Thr
  Variant (7)..(7): Xaa in position 7 is Arg, Lys or Phe
  Variant (8)..(8): Xaa in position 8 is Tyr, Phe or Trp
  Variant (10)..(10): Xaa in position 10 is Tyr, Arg or His
  Variant (11)..(11): Xaa in position 11 is Gly or Gln
  Variant (13)..(13): Xaa in position 13 is Val, Thr or Ile
  Variant (14)..(14): Xaa in position 14 is Thr or Ser
  Variant (15)..(15): Xaa in position 15 is Leu or Phe
  Variant (16)..(16): Xaa in position 16 is Ser, Ile, Pro or Leu
  Variant (17)..(17): Xaa in position 17 is Glu or Ser
  Variant (18)..(18): Xaa in position 18 is Thr, Lys, Asn or Asp
  Variant (19)..(19): Xaa in position 19 is Asp, Lys or Ser
  Variant (20)..(20): Xaa in position 20 is Lys or Ser
  Variant (21)..(21): Xaa in position 21 is Glu or Asp
  Variant (22)..(22): Xaa in position 22 is Phe or Tyr
  Variant (24)..(24): Xaa in position 24 is Asp or Asn
  Variant (28)..(28): Xaa in position 28 is Gln, Ala or Asp
  Variant (29)..(29): Xaa in position 29 is Asp, Glu or Gly
  Variant (30)..(30): Xaa in position 30 is Leu or Ile
  Variant (31)..(31): Xaa in position 31 is Ala, Val or Gly
  Variant (32)..(32): Xaa in position 32 is Met, Ala or Asn
  Variant (33)..(33): Xaa in position 33 is Tyr, His or Asp
  Variant (35)..(35): Xaa in position 35 is Leu or Val
  Variant (36)..(36): Xaa in position 36 is Ala or Pro
  Variant (37)..(37): Xaa in position 37 is Glu or Ala
  Variant (38)..(38): Xaa in position 38 is Met or Thr
  Variant (39)..(39): Xaa in position 39 is Ile, Val or Phe
  Variant (40)..(40): Xaa in position 40 is Gln, Asn or Lys
  Variant (42)..(42): Xaa in position 42 is Met, Ile or Val
  Variant (43)..(43): Xaa in position 43 is Tyr, Asn or His
  Variant (44)..(44): Xaa in position 44 is Ser or Asp
  Variant (45)..(45): Xaa in position 45 is Leu or Val
  Variant (46)..(46): Xaa in position 46 is Ala or Thr
  Variant (47)..(47): Xaa in position 47 is Asn or Gly
  Variant (48)..(48): Xaa in position 48 is Ser or Lys
  Variant (50)..(50): Xaa in position 50 is Ile or Leu
  Variant (51)..(51): Xaa in position 51 is Phe or His
  Variant (52)..(52): Xaa in position 52 is Leu, Val or Tyr
  Variant (60)..(60): Xaa in position 60 is Ile or Leu
  Variant (61)..(61): Xaa in position 61 is Met or Ile
  Variant (62)..(62): Xaa in position 62 is Ser or Ala
  Variant (63)..(63): Xaa in position 63 is Phe or Leu
  Variant (66)..(66): Xaa in position 66 is Leu or Phe
  Variant (67)..(67): Xaa in position 67 is Thr or Ser
  Variant (69)..(69): Xaa in position 69 is Pro or Asp
  Variant (70)..(70): Xaa in position 70 is Arg, Glu or Gln
  Variant (71)..(71): Xaa in position 71 is Val, Ile or Leu
  Variant (72)..(72): Xaa in position 72 is Ala, Val or Leu
XNXRGTXXSXXHXXXXXXXXXXWXWSWXXXXXXDXXXXXXYXXXXXXXKXXXVGHSQGTXXXXAAXXQXXXX

SEQ ID NO: 115 - protein, 31 aa, Artificial sequence
  consensus sequence
  Variant (1)..(1): Xaa in position 1 is Leu or Ile
  Variant (2)..(2): Xaa in position 2 is Asp or Ala
  Variant (3)..(3): Xaa in position 3 is Gln or Glu
  Variant (4)..(4): Xaa in position 4 is Met or Ser
  Variant (5)..(5): Xaa in position 5 is Val, Ile or Leu
  Variant (6)..(6): Xaa in position 6 is Val, Leu or Tyr
  Variant (7)..(7): Xaa in position 7 is Ala, Thr or Asn
  Variant (8)..(8): Xaa in position 8 is Leu or Met
  Variant (10)..(10): Xaa in position 10 is Leu or Ile
  Variant (11)..(11): Xaa in position 11 is His or Phe
  Variant (12)..(12): Xaa in position 12 is Gln or Glu
  Variant (13)..(13): Xaa in position 13 is Ile, Leu or Phe
  Variant (15)..(15): Xaa in position 15 is Phe or Met
  Variant (16)..(16): Xaa in position 16 is Arg or Lys
  Variant (17)..(17): Xaa in position 17 is Ser or Gly
  Variant (18)..(18): Xaa in position 18 is Glu or Gly
  Variant (19)..(19): Xaa in position 19 is Thr, Trp or Ser
  Variant (20)..(20): Xaa in position 20 is Leu, Gly or Val
  Variant (21)..(21): Xaa in position 21 is Val, Ala or Ile
  Variant (22)..(22): Xaa in position 22 is Lys or Ser
  Variant (23)..(23): Xaa in position 23 is Leu or Phe
  Variant (24)..(24): Xaa in position 24 is Val or Leu
  Variant (25)..(25): Xaa in position 25 is Asp, Val or Lys
  Variant (26)..(26): Xaa in position 26 is Ser or Asp
  Variant (29)..(29): Xaa in position 29 is Glu, Asp or Asn
  Variant (30)..(30): Xaa in position 30 is Gly, Thr or Asn
  Variant (31)..(31): Xaa in position 31 is His, Arg or Thr
XXXXXXXXGXXXXNXXXXXXXXXXXXLCXXX

SEQ ID NO: 116 - protein, 151 aa, Artificial sequence
  consensus sequence
MASKPKSNGNSKCNKGFADSYMLLNPEDAHFFDLVHVLYSRNLGNRKFVDSNAEGSYEGSFRQRWLIFVSVVLQKLLLLIAKPLSFFGSCVEFFINLLVLNGGFIMIVINFLTGHLVVPDRNAPNYLSCIGNLDARVKLDAITRDDCRYYV

SEQ ID NO: 117 - protein, 145 aa, Artificial sequence
  consensus sequence
MSETNMKFCNSYFLVDPTKASLLDLLLLLFFPNLTNKRFIDSTPDTLKTVRTTFATRWIIALAVLIQKILILVRKPMASIGRLLTYWPNLLTENGGFFKLILHLVTGKLVKPEESSTTYTSFIGCTDRRVELDKKINVATIEYKS

SEQ ID NO: 118 - protein, 61 aa, Artificial sequence
  consensus sequence
  Variant (1)..(1): Xaa in position 1 is Ser or Met
  Variant (3)..(3): Xaa in position 3 is Ala or Ser
  Variant (4)..(4): Xaa in position 4 is Met or Ile
  Variant (9)..(9): Xaa in position 9 is Ala or Ile
  Variant (10)..(10): Xaa in position 10 is Ser or Ala
  Variant (14)..(14): Xaa in position 14 is Ala or Lys
  Variant (15)..(15): Xaa in position 15 is Ala or Ser
  Variant (16)..(16): Xaa in position 16 is Tyr or Phe
  Variant (17)..(17): Xaa in position 17 is Leu or Ile
  Variant (18)..(18): Xaa in position 18 is Lys or Thr
  Variant (20)..(20): Xaa in position 20 is Leu or Val
  Variant (21)..(21): Xaa in position 21 is Ile or Val
  Variant (24)..(24): Xaa in position 24 is His or Thr
  Variant (28)..(28): Xaa in position 28 is Glu or Asp
  Variant (31)..(31): Xaa in position 31 is Arg or Ser
  Variant (32)..(33): Xaa in position 32 to 33 is Phe or Tyr
  Variant (35)..(35): Xaa in position 35 is Cys or Phe
  Variant (36)..(36): Xaa in position 36 is Trp or Tyr
  Variant (38)..(38): Xaa in position 38 is Asp or Ala
  Variant (41)..(41): Xaa in position 41 is Glu, Asn or Lys
  Variant (42)..(42): Xaa in position 42 is Lys or Arg
  Variant (43)..(43): Xaa in position 43 is Ala or Asn
  Variant (44)..(44): Xaa in position 44 is Thr or Leu
  Variant (47)..(47): Xaa in position 47 is Val or Ala
  Variant (48)..(48): Xaa in position 48 is Leu or Phe
  Variant (49)..(49): Xaa in position 49 is Ile or Val
  Variant (50)..(50): Xaa in position 50 is Val or Phe
  Variant (51)..(51): Xaa in position 51 is Leu or Lys
  Variant (52)..(52): Xaa in position 52 is Asp or Ala
  Variant (53)..(53): Xaa in position 53 is Lys or Ser
  Variant (54)..(54): Xaa in position 54 is His, Ser or Asn
  Variant (55)..(55): Xaa in position 55 is Glu or Thr
  Variant (57)..(57): Xaa in position 57 is Arg or Pro
  Variant (58)..(58): Xaa in position 58 is Asp or Asn
  Variant (59)..(59): Xaa in position 59 is Thr or Leu
  Variant (60)..(60): Xaa in position 60 is Tyr or Ile
XLXXMASKXXYENXXXXXSXXKNXWKMXFVXXXDXXNXFQXXXXTQXXXXXXXXXNXXXXV

SEQ ID NO: 119 - protein, 37 aa, Artificial sequence
  consensus sequence
  Variant (1)..(1): Xaa in position 1 is Gly or Glu
  Variant (2)..(2): Xaa in position 2 is Ile or Leu
  Variant (3)..(3): Xaa in position 3 is Pro or Lys
  Variant (4)..(4): Xaa in position 4 is Gly or Asn
  Variant (5)..(5): Xaa in position 5 is Ile or Val
  Variant (8)..(8): Xaa in position 8 is Met or Val
  Variant (10)..(10): Xaa in position 10 is Gly or Ala
  Variant (13)..(13): Xaa in position 13 is Met or Ser
  Variant (22)..(22): Xaa in position 22 is Val or no amino acid
  Variant (28)..(28): Xaa in position 28 is Ile or Asn
  Variant (29)..(29): Xaa in position 29 is Gln or Ile
  Variant (30)..(30): Xaa in position 30 is Arg, Pro or Thr
  Variant (31)..(31): Xaa in position 31 is Asp or Leu
  Variant (32)..(32): Xaa in position 32 is Glu, Gly or Arg
  Variant (33)..(33): Xaa in position 33 is Asn or His
  Variant (34)..(34): Xaa in position 34 is Gln or Leu
  Variant (35)..(36): Xaa in position 35 to 36 is Pro or no amino acid
  Variant (37)..(37): Xaa in position 37 is Leu or Tyr
XXXXXGKXHXGFXKALGLQKNXGWPKEXXXXXXXXXX

SEQ ID NO: 120 - protein, 16 aa, Artificial sequence
  consensus sequence
  Variant (1)..(1): Xaa in position 1 is Thr or Val
  Variant (4)..(4): Xaa in position 4 is Gln or Asp
  Variant (5)..(5): Xaa in position 5 is Lys or Ile
  Variant (8)..(8): Xaa in position 8 is Asp or Lys
  Variant (9)..(9): Xaa in position 9 is Met or Gly
  Variant (10)..(10): Xaa in position 10 is Phe or Leu
  Variant (11)..(11): Xaa in position 11 is Ala or Ser
  Variant (12)..(12): Xaa in position 12 is Lys or Glu
  Variant (14)..(14): Xaa in position 14 is Lys or Pro
  Variant (15)..(15): Xaa in position 15 is Thr or Asn
  Variant (16)..(16): Xaa in position 16 is Ser, Ala or Leu
XIRXXLRXXXXXNXXX

SEQ ID NO: 121 - protein, 59 aa, Artificial sequence
  consensus sequence
  Variant (1)..(1): Xaa in position 1 is Ala or Ile
  Variant (3)..(3): Xaa in position 3 is Phe or Tyr
  Variant (5)..(5): Xaa in position 5 is Ala or Thr
  Variant (6)..(6): Xaa in position 6 is Val or Ile
  Variant (7)..(7): Xaa in position 7 is Leu or Met
  Variant (8)..(8): Xaa in position 8 is Ala or Phe
  Variant (9)..(9): Xaa in position 9 is Ile or Leu
  Variant (11)..(11): Xaa in position 11 is Gly or Asp
  Variant (13)..(13): Xaa in position 13 is Asp or Lys
  Variant (14)..(14): Xaa in position 14 is Glu or Leu
  Variant (16)..(16): Xaa in position 16 is Leu or Ile
  Variant (17)..(17): Xaa in position 17 is Asp or Glu
  Variant (18)..(18): Xaa in position 18 is Lys or Arg
  Variant (22)..(22): Xaa in position 22 is Val or Ile
  Variant (30)..(30): Xaa in position 30 is Ile or Val
  Variant (34)..(34): Xaa in position 34 is Val or Ala
  Variant (35)..(35): Xaa in position 35 is Phe or Tyr
  Variant (36)..(36): Xaa in position 36 is Gly or Ala
  Variant (37)..(37): Xaa in position 37 is Glu or Gln
  Variant (38)..(38): Xaa in position 38 is Phe or Tyr
  Variant (40)..(40): Xaa in position 40 is Lys or Arg
  Variant (41)..(41): Xaa in position 41 is Glu or Gln
  Variant (42)..(42): Xaa in position 42 is Val or Lys
  Variant (43)..(43): Xaa in position 43 is Val or Leu
  Variant (45)..(45): Xaa in position 45 is Lys or Glu
  Variant (46)..(46): Xaa in position 46 is His or Asn
  Variant (47)..(47): Xaa in position 47 is Gly or Ser
  Variant (49)..(49): Xaa in position 49 is Glu or Arg
  Variant (51)..(51): Xaa in position 51 is Glu or Cys
  Variant (56)..(56): Xaa in position 56 is Asn or Cys
XLXPXXXXXHXEXXLXXXLEGXYTFGQPRXGDEXXXXXMXXXXRXXXIXYXRFVYXNDI

SEQ ID NO: 122 - protein, 38 aa, Artificial sequence
  consensus sequence
  Variant (1)..(1): Xaa in position 1 is Ile or Leu
  Variant (3)..(3): Xaa in position 3 is Phe or Tyr
  Variant (7)..(7): Xaa in position 7 is Ile or Asp
  Variant (9)..(9): Xaa in position 9 is Leu or Phe
  Variant (10)..(10): Xaa in position 10 is Ser or no amino acid
  Variant (11)..(11): Xaa in position 11 is Tyr or Phe
  Variant (14)..(14): Xaa in position 14 is Tyr or Phe
  Variant (16)..(16): Xaa in position 16 is Ser or Ile
  Variant (18)..(18): Xaa in position 18 is Asn or Leu
  Variant (19)..(19): Xaa in position 19 is Tyr or Phe
  Variant (22)..(22): Xaa in position 22 is Ser or Arg
  Variant (23)..(23): Xaa in position 23 is Leu or Arg
  Variant (25)..(25): Xaa in position 25 is Lys or Glu
  Variant (26)..(26): Xaa in position 26 is Gly or Leu
  Variant (27)..(27): Xaa in position 27 is Lys or Arg
  Variant (28)..(28): Xaa in position 28 is Val or Ile
  Variant (29)..(29): Xaa in position 29 is Lys or Leu
  Variant (31)..(31): Xaa in position 31 is Asp or Glu
  Variant (32)..(32): Xaa in position 32 is Ala or Glu
  Variant (35)..(35): Xaa in position 35 is Glu or Lys
  Variant (38)..(38): Xaa in position 38 is Ile or Phe
XPXDDKXLXXXKHXGXCXXFNXXYXXXXXEXXPNXNYX

SEQ ID NO: 123 - protein, 81 aa, Artificial sequence
  consensus sequence
  Variant (1)..(1): Xaa in position 1 is Ser or Asn
  Variant (2)..(2): Xaa in position 2 is Pro or Leu
  Variant (3)..(3): Xaa in position 3 is Trp or Leu
  Variant (4)..(4): Xaa in position 4 is Cys or Cys
  Variant (5)..(5): Xaa in position 5 is Val or Leu
  Variant (8)..(8): Xaa in position 8 is Lys or Met
  Variant (10)..(10): Xaa in position 10 is Phe or Leu
  Variant (12)..(12): Xaa in position 12 is Ala or Gly
  Variant (13)..(13): Xaa in position 13 is Val or Ala
  Variant (14)..(14): Xaa in position 14 is Leu or Trp
  Variant (16)..(16): Xaa in position 16 is Leu or Phe
  Variant (21)..(21): Xaa in position 21 is Thr or Ile
  Variant (23)..(23): Xaa in position 23 is Ala or Gln
  Variant (24)..(24): Xaa in position 24 is Tyr or Phe
  Variant (25)..(25): Xaa in position 25 is Lys or Trp
  Variant (26)..(26): Xaa in position 26 is Asn or Lys
  Variant (28)..(28): Xaa in position 28 is Pro or Lys
  Variant (29)..(29): Xaa in position 29 is His or Asp
  Variant (31)..(31): Xaa in position 31 is Arg or Lys
  Variant (33)..(33): Xaa in position 33 is Gly or Asn
  Variant (35)..(35): Xaa in position 35 is Phe or Met
  Variant (36)..(36): Xaa in position 36 is Leu or Met
  Variant (37)..(37): Xaa in position 37 is Phe or Arg
  Variant (39)..(39): Xaa in position 39 is Phe or Ile
  Variant (41)..(41): Xaa in position 41 is Leu or Ile
  Variant (44)..(45): Xaa in position 44 to 45 is Leu or Ile
  Variant (46)..(46): Xaa in position 46 is Ile or Leu
  Variant (49)..(49): Xaa in position 49 is Leu or Thr
  Variant (50)..(50): Xaa in position 50 is Pro or Ser
  Variant (51)..(51): Xaa in position 51 is Ala or Asn
  Variant (53)..(53): Xaa in position 53 is Gly or Leu
  Variant (55)..(55): Xaa in position 55 is Gln or Tyr
  Variant (58)..(58): Xaa in position 58 is Ile or Val
  Variant (62)..(62): Xaa in position 62 is Leu or Arg
  Variant (65)..(65): Xaa in position 65 is Ser or Gly
  Variant (67)..(67): Xaa in position 67 is Glu or Ser
  Variant (68)..(68): Xaa in position 68 is Lys or Arg
  Variant (69)..(69): Xaa in position 69 is His or Ser
  Variant (71)..(71): Xaa in position 71 is Lys or Thr
  Variant (72)..(72): Xaa in position 72 is Ala or Thr
  Variant (73)..(73): Xaa in position 73 is Asp or Pro
  Variant (74)..(74): Xaa in position 74 is Glu or no amino acid
  Variant (75)..(75): Xaa in position 75 is Asp or no amino acid
  Variant (76)..(76): Xaa in position 76 is Lys or no amino acid
  Variant (77)..(77): Xaa in position 77 is Leu or no amino acid
  Variant (78)..(78): Xaa in position 78 is Ser or no amino acid
  Variant (79)..(79): Xaa in position 79 is Leu or no amino acid
  Variant (80)..(80): Xaa in position 80 is Ile or no amino acid
  Variant (81)..(81): Xaa in position 81 is Ala or no amino acid
XXXXXIPXMXNXXXEXIRSFXIXXXXGXXYXEXWXXXSXRXVGXXXPGXXXHXPXDYXNSTXLGXIXXXFXXXXXXXXXXX

SEQ ID NO: 124 - protein, 54 aa, Artificial sequence
  consensus sequence
MTACVPNLKGTSSLKDDEASLQRELRNAECMASLASSGGFHKRDGLYNPQHPSM

SEQ ID NO: 125 - protein, 83 aa, Artificial sequence
  consensus sequence
  Variant (1)..(1): Xaa in position 1 is Cys or Met
  Variant (2)..(2): Xaa in position 2 is Leu or Glu
  Variant (3)..(3): Xaa in position 3 is Gly or Asp
  Variant (4)..(4): Xaa in position 4 is Glu or Phe
  Variant (5)..(5): Xaa in position 5 is Gly or Arg
  Variant (6)..(6): Xaa in position 6 is Gln or Val
  Variant (7)..(7): Xaa in position 7 is Ser or Arg
  Variant (9)..(9): Xaa in position 9 is Gly or Glu
  Variant (10)..(10): Xaa in position 10 is Ser or Phe
  Variant (11)..(11): Xaa in position 11 is Gln or Ser
  Variant (12)..(12): Xaa in position 12 is Gly or Ser
  Variant (13)..(13): Xaa in position 13 is Phe or Thr
  Variant (14)..(14): Xaa in position 14 is Ser or Thr
  Variant (15)..(15): Xaa in position 15 is Asn or Ser
  Variant (16)..(16): Xaa in position 16 is Asn or Val
  Variant (17)..(17): Xaa in position 17 is Met or Ser
  Variant (19)..(19): Xaa in position 19 is Asn or Asp
  Variant (21)..(21): Xaa in position 21 is Gln or Arg
  Variant (23)..(23): Xaa in position 23 is Leu or Val
  Variant (27)..(27): Xaa in position 27 is Gln or Arg
  Variant (28)..(28): Xaa in position 28 is Glu or Cys
  Variant (31)..(31): Xaa in position 31 is Asp or Glu
  Variant (33)..(33): Xaa in position 33 is Ile or Val
  Variant (34)..(34): Xaa in position 34 is Val or Ile
  Variant (35)..(35): Xaa in position 35 is Asn or Asp
  Variant (36)..(36): Xaa in position 36 is Val or Met
  Variant (37)..(37): Xaa in position 37 is Arg or Gly
  Variant (38)..(38): Xaa in position 38 is Gly or no amino acid
  Variant (39)..(39): Xaa in position 39 is Lys or Arg
  Variant (41)..(41): Xaa in position 41 is Thr or Val
  Variant (42)..(42): Xaa in position 42 is Ser or Asp
  Variant (44)..(44): Xaa in position 44 is Glu or Cys
  Variant (45)..(45): Xaa in position 45 is Lys or Asn
  Variant (46)..(46): Xaa in position 46 is Gln or Asp
  Variant (47)..(47): Xaa in position 47 is Gln or Val
  Variant (48)..(48): Xaa in position 48 is Ser or Leu
  Variant (49)..(49): Xaa in position 49 is Phe or Ile
  Variant (50)..(50): Xaa in position 50 is Arg or Gln
  Variant (51)..(51): Xaa in position 51 is Asp or Gln
  Variant (52)..(52): Xaa in position 52 is Ile or Leu
  Variant (53)..(53): Xaa in position 53 is Gly or Phe
  Variant (54)..(54): Xaa in position 54 is Leu or Pro
  Variant (55)..(55): Xaa in position 55 is Asp or Gly
  Variant (56)..(56): Xaa in position 56 is Gly or Arg
  Variant (57)..(57): Xaa in position 57 is Ser or Arg
  Variant (58)..(58): Xaa in position 58 is Lys or Arg
  Variant (59)..(59): Xaa in position 59 is Asp or Pro
  Variant (60)..(60): Xaa in position 60 is Ser or Gly
  Variant (61)..(61): Xaa in position 61 is Asp or Phe
  Variant (63)..(63): Xaa in position 63 is Lys or Leu
  Variant (65)..(65): Xaa in position 65 is Thr or Ser
  Variant (66)..(66): Xaa in position 66 is Ser or Glu
  Variant (67)..(67): Xaa in position 67 is Gln or Ile
  Variant (68)..(68): Xaa in position 68 is Ser or Lys
  Variant (69)..(69): Xaa in position 69 is Val or Ser
  Variant (70)..(70): Xaa in position 70 is Gln or Glu
  Variant (71)..(71): Xaa in position 71 is Ile or Leu
  Variant (72)..(72): Xaa in position 72 is Ser or Cys
  Variant (73)..(73): Xaa in position 73 is Asn or Ser
  Variant (74)..(74): Xaa in position 74 is Gly or no amino acid
  Variant (75)..(75): Xaa in position 75 is Pro or no amino acid
  Variant (76)..(76): Xaa in position 76 is Asn or no amino acid
  Variant (77)..(77): Xaa in position 77 is Gly or no amino acid
  Variant (78)..(79): Xaa in position 78 to 79 is Ser or no amino acid
  Variant (80)..(81): Xaa in position 80 to 81 is Ala or no amino acid
  Variant (82)..(82): Xaa in position 82 is Asn or no amino acid
  Variant (83)..(83): Xaa in position 83 is Ser or no amino acid
XXXXXXXHXXXXXXXXXLXSXYXKAAXXLLXEXXXXXXXQXXLXXXXXXXXXXXXXXXXXXGXSXXXXXXXXXXXXXXXXXXX

SEQ ID NO: 126 - protein, 31 aa, Artificial sequence
  consensus sequence
  Variant (1)..(1): Xaa in position 1 is Asn or Glu
  Variant (3)..(3): Xaa in position 3 is Leu, Gln or His
  Variant (4)..(4): Xaa in position 4 is Asp, Ile or Lys
  Variant (5)..(5): Xaa in position 5 is Lys or Arg
  Variant (6)..(6): Xaa in position 6 is Lys or Ile
  Variant (10)..(10): Xaa in position 10 is Leu or Tyr
  Variant (12)..(12): Xaa in position 12 is Met or Leu
  Variant (14)..(14): Xaa in position 14 is Asp, Gln or Glu
  Variant (15)..(15): Xaa in position 15 is Glu or Gln
  Variant (18)..(18): Xaa in position 18 is Lys, Glu or Arg
  Variant (19)..(19): Xaa in position 19 is Arg or Lys
  Variant (20)..(20): Xaa in position 20 is Tyr or Phe
  Variant (21)..(21): Xaa in position 21 is Arg or Asp
  Variant (22)..(22): Xaa in position 22 is Gln, Ile or His
  Variant (25)..(25): Xaa in position 25 is His, Asn or Glu
  Variant (27)..(27): Xaa in position 27 is Met or Leu
  Variant (28)..(28): Xaa in position 28 is Gln, Glu or Lys
  Variant (29)..(29): Xaa in position 29 is Ile, Gln or Ala
  Variant (31)..(31): Xaa in position 31 is Val or Ile
XLXXXXTKLXSXLXXVDXXXXXYCXQXXXVX

SEQ ID NO: 127 - protein, 66 aa, Artificial sequence
  consensus sequence
  Variant (1)..(1): Xaa in position 1 is Asp or Glu
  Variant (2)..(2): Xaa in position 2 is Met, Glu, Thr or Ser
  Variant (3)..(3): Xaa in position 3 is Val or Ser
  Variant (4)..(4): Xaa in position 4 is Ala or Ser
  Variant (5)..(5): Xaa in position 5 is Gly, Arg, Glu or Ile
  Variant (6)..(6): Xaa in position 6 is Gln, Glu or Ser
  Variant (7)..(7): Xaa in position 7 is Glu, Asp or Gln
  Variant (8)..(8): Xaa in position 8 is Ser, Asp or no amino acid
  Variant (9)..(9): Xaa in position 9 is Leu, Phe or no amino acid
  Variant (10)..(10): Xaa in position 10 is Thr, Val or no amino acid
  Variant (11)..(11): Xaa in position 11 is Gly, Pro or no amino acid
  Variant (12)..(12): Xaa in position 12 is Gly, Lys or no amino acid
  Variant (13)..(13): Xaa in position 13 is Gly, Ile or no amino acid
  Variant (14)..(14): Xaa in position 14 is Lys, Val or no amino acid
  Variant (15)..(15): Xaa in position 15 is Pro, Thr or no amino acid
  Variant (16)..(16): Xaa in position 16 is Asp, Ser or no amino acid
  Variant (17)..(17): Xaa in position 17 is Cys, Glu, Asn or Ser
  Variant (18)..(18): Xaa in position 18 is Gly or Arg
  Variant (19)..(19): Xaa in position 19 is Ala or Gly
  Variant (20)..(20): Xaa in position 20 is Ala, Ser or Cys
  Variant (21)..(21): Xaa in position 21 is Glu, Lys or Gly
  Variant (22)..(22): Xaa in position 22 is Pro, Leu, Asn or Gly
  Variant (23)..(23): Xaa in position 23 is Tyr or Ile
  Variant (24)..(24): Xaa in position 24 is Thr, His or Leu
  Variant (25)..(25): Xaa in position 25 is Ala, Gly or Ser
  Variant (26)..(26): Xaa in position 26 is Leu, Thr or Val
  Variant (27)..(27): Xaa in position 27 is Ala, Arg or Gly
  Variant (28)..(28): Xaa in position 28 is Leu, Phe or Val
  Variant (29)..(29): Xaa in position 29 is Arg, Gln, Thr or Lys
  Variant (30)..(30): Xaa in position 30 is Thr, Ala, Asp or Gly
  Variant (31)..(31): Xaa in position 31 is Ile, Met or Asn
  Variant (32)..(32): Xaa in position 32 is Ser, Thr or Val
  Variant (33)..(33): Xaa in position 33 is Arg, Lys or Glu
  Variant (34)..(34): Xaa in position 34 is His, Gln or Ala
  Variant (35)..(35): Xaa in position 35 is Phe or Leu
  Variant (36)..(36): Xaa in position 36 is Arg, Gly or Gln
  Variant (37)..(37): Xaa in position 37 is Cys, Ser or Val
  Variant (38)..(38): Xaa in position 38 is Leu or Ser
  Variant (39)..(39): Xaa in position 39 is His, Gln, Lys or Glu
  Variant (40)..(40): Xaa in position 40 is Asp, Glu or Arg
  Variant (41)..(41): Xaa in position 41 is Ala or Arg
  Variant (42)..(42): Xaa in position 42 is Ile or Asn
  Variant (43)..(43): Xaa in position 43 is Ser, Leu, Met or Arg
  Variant (44)..(44): Xaa in position 44 is Gly or Ser
  Variant (45)..(45): Xaa in position 45 is Gln or Ala
  Variant (46)..(46): Xaa in position 46 is Ile or Asn
  Variant (47)..(47): Xaa in position 47 is Gln, Lys or Pro
  Variant (48)..(48): Xaa in position 48 is Val, Ser, Ala or Gly
  Variant (49)..(49): Xaa in position 49 is Thr, Leu, Ala or Asp
  Variant (50)..(50): Xaa in position 50 is Gln, Arg, Ser or Glu
  Variant (51)..(51): Xaa in position 51 is Arg or Glu
  Variant (52)..(52): Xaa in position 52 is Asn, Arg, Ser or Asp
  Variant (53)..(53): Xaa in position 53 is Leu, Phe or Asp
  Variant (54)..(54): Xaa in position 54 is Gly or Ile
  Variant (55)..(55): Xaa in position 55 is Gly, Glu or Ile
  Variant (56)..(56): Xaa in position 56 is Gln, Glu or Ser
  Variant (57)..(57): Xaa in position 57 is Glu, Asp or Gln
  Variant (58)..(58): Xaa in position 58 is Ser, Asp or no amino acid
  Variant (59)..(59): Xaa in position 59 is Leu, Phe or no amino acid
  Variant (60)..(60): Xaa in position 60 is Thr, Val or no amino acid
  Variant (61)..(61): Xaa in position 61 is Gly, Pro or no amino acid
  Variant (62)..(62): Xaa in position 62 is Gly, Lys or no amino acid
  Variant (63)..(63): Xaa in position 63 is Gly, Ile or no amino acid
  Variant (64)..(64): Xaa in position 64 is Lys, Val or no amino acid
  Variant (65)..(65): Xaa in position 65 is Pro, Thr or no amino acid
  Variant (66)..(66): Xaa in position 66 is Asp, Ser or no amino acid
XXXXXXXXXXXXXXXXXXXXXXXXXXXXXXXXXXXXXXXXXXXXXXXXXXXXXXXXXXXXXXXXXX

SEQ ID NO: 128 - protein, 28 aa, Artificial sequence
  consensus sequence
  Variant (1)..(1): Xaa in position 1 is Asp or Glu
  Variant (2)..(2): Xaa in position 2 is Gln, Gly, Asn or Arg
  Variant (3)..(3): Xaa in position 3 is Gln, Asn or Ser
  Variant (4)..(4): Xaa in position 4 is Leu, Thr or Ser
  Variant (5)..(5): Xaa in position 5 is Arg, Gly or Pro
  Variant (6)..(6): Xaa in position 6 is Ser or no amino acid
  Variant (7)..(7): Xaa in position 7 is Gly, Ser or no amino acid
  Variant (8)..(8): Xaa in position 8 is Asp or no amino acid
  Variant (9)..(9): Xaa in position 9 is Gln, Leu or Asp
  Variant (10)..(10): Xaa in position 10 is Gln or Glu
  Variant (11)..(11): Xaa in position 11 is Lys or Arg
  Variant (12)..(12): Xaa in position 12 is Ala, Gly or Leu
  Variant (13)..(13): Xaa in position 13 is Leu, Gly or Asn
  Variant (14)..(14): Xaa in position 14 is Gln, Trp or Ala
  Variant (15)..(15): Xaa in position 15 is Gln, Val or Glu
  Variant (16)..(16): Xaa in position 16 is Leu, Gln or Val
  Variant (17)..(17): Xaa in position 17 is Gly or Glu
  Variant (18)..(18): Xaa in position 18 is Val, Pro, Met or Gly
  Variant (19)..(19): Xaa in position 19 is Met, Gln, Ile or Asp
  Variant (21)..(21): Xaa in position 21 is Gln, His, Ile or Pro
  Variant (22)..(22): Xaa in position 22 is Ala, Met or Asp
  Variant (23)..(23): Xaa in position 23 is Trp, Leu or Asp
  Variant (24)..(24): Xaa in position 24 is Arg, Lys or Gly
  Variant (25)..(25): Xaa in position 25 is Asp or no amino acid
  Variant (26)..(26): Xaa in position 26 is Pro or Ala
  Variant (27)..(27): Xaa in position 27 is Gln, Ile, Lys or Ala
  Variant (28)..(28): Xaa in position 28 is Arg, Glu or Gln
XXXXXXXXXXXXXXXXXXXRXXXXXXXX

SEQ ID NO: 129 - protein, 28 aa, Artificial sequence
  consensus sequence
  Variant (1)..(1): Xaa in position 1 is Glu, His or Ser
  Variant (2)..(2): Xaa in position 2 is His or Ile
  Variant (4)..(4): Xaa in position 4 is Leu or Phe
  Variant (5)..(5): Xaa in position 5 is His or Thr
  Variant (6)..(6): Xaa in position 6 is Pro or His
  Variant (7)..(7): Xaa in position 7 is Tyr or Ile
  Variant (8)..(8): Xaa in position 8 is Pro or Gln
  Variant (9)..(9): Xaa in position 9 is Lys, Ser or Arg
  Variant (10)..(10): Xaa in position 10 is Asp or Ile
  Variant (11)..(11): Xaa in position 11 is Ser, Ala or Gln
  Variant (12)..(12): Xaa in position 12 is Glu or Thr
  Variant (13)..(13): Xaa in position 13 is Lys or Asn
  Variant (14)..(14): Xaa in position 14 is Ile, Leu or Ala
  Variant (15)..(15): Xaa in position 15 is Met or Cys
  Variant (17)..(17): Xaa in position 17 is Ala or Gln
  Variant (18)..(18): Xaa in position 18 is Arg, Ser or Lys
  Variant (20)..(20): Xaa in position 20 is Thr or Ala
  Variant (23)..(23): Xaa in position 23 is Thr or Ser
  Variant (24)..(24): Xaa in position 24 is Lys or Arg
  Variant (25)..(25): Xaa in position 25 is Asn or Ser
  Variant (28)..(28): Xaa in position 28 is Ala or Ser
XXFXXXXXXXXXXXXLXXQXGLXXXQVX

SEQ ID NO: 130 - protein, 26 aa, Artificial sequence
  consensus sequence
  Variant (1)..(1): Xaa in position 1 is Val or Ile
  Variant (6)..(6): Xaa in position 6 is Lys or Leu
  Variant (9)..(9): Xaa in position 9 is Phe or Ile
  Variant (10)..(10): Xaa in position 10 is Asp, Gly or Lys
  Variant (11)..(11): Xaa in position 11 is Val, Asp or Glu
  Variant (12)..(12): Xaa in position 12 is Gln, Ser or His
  Variant (13)..(13): Xaa in position 13 is Ala, Ser or Glu
  Variant (14)..(14): Xaa in position 14 is Ser, Asp or Gln
  Variant (15)..(15): Xaa in position 15 is Asp, Glu or Asn
  Variant (16)..(16): Xaa in position 16 is Asn, Ser or Gly
  Variant (17)..(17): Xaa in position 17 is Lys or Met
  Variant (18)..(18): Xaa in position 18 is Arg, Gln or Asp
  Variant (19)..(19): Xaa in position 19 is Glu, Arg or Asp
  Variant (20)..(20): Xaa in position 20 is Glu or Thr
  Variant (21)..(21): Xaa in position 21 is Ser, Gly or Asn
  Variant (22)..(22): Xaa in position 22 is Gln, Asn or Thr
  Variant (23)..(23): Xaa in position 23 is Asp or Ser
  Variant (24)..(24): Xaa in position 24 is Asn, Asp or Lys
  Variant (25)..(25): Xaa in position 25 is Leu, Ser or Asn
  Variant (26)..(26): Xaa in position 26 is Ile, Asn or Asp
XEEMYXEEXXXXXXXXXXXXXXXXXX

SEQ ID NO: 131 - protein, 143 aa, Artificial sequence
  consensus sequence
TVDDSVQHHGLKLDHADRGIQSSDHGENAMDPRIGKLQGDQRFNMNNNNSPYYGDGCIMASTPATYDLSELGNIAVGGHVSLALELRNCESEGFGVSNDDMHKRRKKTLASSPEADLLDYHFTDTGKQQNKFGNPHLLHEFVV

SEQ ID NO: 132 - protein, 48 aa, Artificial sequence
  consensus sequence
  Variant (4)..(4): Xaa in position 4 is Ala or no amino acid
  Variant (5)..(5): Xaa in position 5 is Ile or Val
  Variant (6)..(6): Xaa in position 6 is Ala or Phe
  Variant (8)..(9): Xaa in position 8 to 9 is Ala or Ser
  Variant (10)..(10): Xaa in position 10 is Leu or Ala
  Variant (15)..(15): Xaa in position 15 is Phe or Ile
  Variant (16)..(16): Xaa in position 16 is Ser or Phe
  Variant (17)..(17): Xaa in position 17 is Phe or Leu
  Variant (18)..(18): Xaa in position 18 is Arg, Ser or Cys
  Variant (19)..(19): Xaa in position 19 is Lys or no amino acid
  Variant (20)..(20): Xaa in position 20 is Thr or no amino acid
  Variant (21)..(21): Xaa in position 21 is Arg or no amino acid
  Variant (22)..(22): Xaa in position 22 is Ser or Ala
  Variant (23)..(23): Xaa in position 23 is Ser or Gly
  Variant (24)..(24): Xaa in position 24 is Lys or Gln
  Variant (26)..(26): Xaa in position 26 is Asp or Thr
  Variant (27)..(27): Xaa in position 27 is Thr or Arg
  Variant (29)..(29): Xaa in position 29 is Lys or Arg
  Variant (30)..(30): Xaa in position 30 is Gly or Asp
  Variant (31)..(31): Xaa in position 31 is Leu or Val
  Variant (34)..(34): Xaa in position 34 is Arg or Glu
  Variant (41)..(41): Xaa in position 41 is Tyr or Phe
  Variant (44)..(44): Xaa in position 44 is Glu or Asp
  Variant (45)..(45): Xaa in position 45 is Ile or Ser
  Variant (46)..(46): Xaa in position 46 is Gly or no amino acid
  Variant (47)..(47): Xaa in position 47 is Leu or no amino acid
  Variant (48)..(48): Xaa in position 48 is Val or no amino acid
MNAXXXTXXXLSLPXXXXXXXXXXLXXKXXXKGXFRVFAVXGEXXXXX

SEQ ID NO: 133 - protein, 92 aa, Artificial sequence
  consensus sequence
  Variant (1)..(1): Xaa in position 1 is Asn or Ser
  Variant (2)..(2): Xaa in position 2 is Thr, Gln or Ala
  Variant (4)..(4): Xaa in position 4 is Ser or Gly
  Variant (5)..(5): Xaa in position 5 is Ala or His
  Variant (16)..(16): Xaa in position 16 is Val, Thr or Phe
  Variant (18)..(18): Xaa in position 18 is Gln or Pro
  Variant (19)..(20): Xaa in position 19 to 20 is Pro or no amino acid
  Variant (21)..(21): Xaa in position 21 is Tyr or Asn
  Variant (23)..(23): Xaa in position 23 is Gly or no amino acid
  Variant (24)..(24): Xaa in position 24 is Lys or no amino acid
  Variant (27)..(27): Xaa in position 27 is Phe or Val
  Variant (28)..(28): Xaa in position 28 is Leu or Met
  Variant (30)..(30): Xaa in position 30 is Val or Ile
  Variant (31)..(31): Xaa in position 31 is Tyr, Ser or Asn
  Variant (39)..(39): Xaa in position 39 is Tyr, Phe, His or Leu
  Variant (44)..(44): Xaa in position 44 is Cys or Leu
  Variant (49)..(49): Xaa in position 49 is Ser or Arg
  Variant (52)..(52): Xaa in position 52 is Leu or Val
  Variant (57)..(57): Xaa in position 57 is Leu or His
  Variant (60)..(60): Xaa in position 60 is Glu or Asp
  Variant (64)..(64): Xaa in position 64 is Glu or Asp
  Variant (72)..(72): Xaa in position 72 is Asp or Glu
  Variant (79)..(79): Xaa in position 79 is Met, Val or Leu
  Variant (85)..(85): Xaa in position 85 is Glu or Gly
  Variant (88)..(88): Xaa in position 88 is Glu or Asp
  Variant (92)..(92): Xaa in position 92 is Gln or Lys
XXWXXLFDVEDPRSKXPXXXXKXXGKXXDXXQALEVARXDIQYXDWRAXQDXLTIMXLHXKVVXVLNPLARXYKSIGTXKKELAXLQXELAX

SEQ ID NO: 134 - protein, 64 aa, Artificial sequence
  consensus sequence
  Variant (1)..(2): Xaa in position 1 to 2 is Ser or Thr
  Variant (5)..(5): Xaa in position 5 is Asp or Glu
  Variant (9)..(9): Xaa in position 9 is Tyr or His
  Variant (17)..(17): Xaa in position 17 is Lys or Arg
  Variant (20)..(20): Xaa in position 20 is Gln or Pro
  Variant (21)..(21): Xaa in position 21 is Glu or Asp
  Variant (23)..(23): Xaa in position 23 is Ser or Val
  Variant (24)..(24): Xaa in position 24 is Thr or Ala
  Variant (26)..(26): Xaa in position 26 is Glu or Asp
  Variant (27)..(27): Xaa in position 27 is Val or Ser
  Variant (28)..(28): Xaa in position 28 is Ser, Asp or Ala
  Variant (29)..(29): Xaa in position 29 is Gln or Arg
  Variant (30)..(30): Xaa in position 30 is Pro or Thr
  Variant (31)..(32): Xaa in position 31 to 32 is Ser or no amino acid
  Variant (34)..(34): Xaa in position 34 is Pro or Tyr
  Variant (38)..(38): Xaa in position 38 is Phe, Val or Ala
  Variant (39)..(39): Xaa in position 39 is Lys, Gln or Asn
  Variant (40)..(40): Xaa in position 40 is Pro, Asp or Ser
  Variant (41)..(41): Xaa in position 41 is Val or Leu
  Variant (42)..(42): Xaa in position 42 is Asp or Val
  Variant (43)..(43): Xaa in position 43 is Ile, Arg or Thr
  Variant (46)..(46): Xaa in position 46 is Arg or Thr
  Variant (47)..(47): Xaa in position 47 is Arg or Asn
  Variant (48)..(48): Xaa in position 48 is Ser, Ile or Gln
  Variant (49)..(49): Xaa in position 49 is Pro or Gly
  Variant (50)..(50): Xaa in position 50 is Arg or Gly
  Variant (54)..(54): Xaa in position 54 is Asp or Asn
  Variant (55)..(55): Xaa in position 55 is Ile or Val
  Variant (61)..(61): Xaa in position 61 is Ser or Pro
  Variant (63)..(63): Xaa in position 63 is His or Ser
  Variant (64)..(64): Xaa in position 64 is Thr or Pro
XXALXKLAXMEELVNDXLLXXRXXTXXXXXXXSXSTSXXXXXXEKXXXXXKSLXXSGPVQXYXX

SEQ ID NO: 135 - protein, 50 aa, Artificial sequence
  consensus sequence
  Variant (1)..(1): Xaa in position 1 is Ser or Thr
  Variant (2)..(2): Xaa in position 2 is Thr, Ala or Asn
  Variant (6)..(6): Xaa in position 6 is Asp or His
  Variant (10)..(10): Xaa in position 10 is Ile or Val
  Variant (13)..(13): Xaa in position 13 is Glu or Asp
  Variant (16)..(16): Xaa in position 16 is Glu or Asp
  Variant (17)..(17): Xaa in position 17 is Glu, Gln or Asp
  Variant (18)..(18): Xaa in position 18 is Pro or Phe
  Variant (19)..(19): Xaa in position 19 is Trp or Val
  Variant (20)..(20): Xaa in position 20 is Val or Glu
  Variant (25)..(25): Xaa in position 25 is Lys or Glu
  Variant (28)..(28): Xaa in position 28 is Lys or Glu
  Variant (33)..(33): Xaa in position 33 is Gln or Arg
  Variant (43)..(43): Xaa in position 43 is Leu or Ile
  Variant (44)..(44): Xaa in position 44 is His, Asp or Glu
  Variant (47)..(47): Xaa in position 47 is Ser or Thr
  Variant (48)..(48): Xaa in position 48 is Val or Lys
  Variant (50)..(50): Xaa in position 50 is Glu or Lys
XXDLKXDTMXPIXCFXXXXXIFRGXDGXPGCVXNTCAHRACPXXLGXXNX

SEQ ID NO: 136 - protein, 65 aa, Artificial sequence
  consensus sequence
  Variant (1)..(1): Xaa in position 1 is Thr or Ser
  Variant (5)..(5): Xaa in position 5 is Lys or Asn
  Variant (7)..(7): Xaa in position 7 is Glu or Thr
  Variant (13)..(13): Xaa in position 13 is Arg or Lys
  Variant (14)..(14): Xaa in position 14 is Leu or Gln
  Variant (16)..(16): Xaa in position 16 is Asn or Asp
  Variant (19)..(19): Xaa in position 19 is Ile or Leu
  Variant (22)..(22): Xaa in position 22 is Leu or Ile
  Variant (25)..(25): Xaa in position 25 is Phe or Leu
  Variant (27)..(27): Xaa in position 27 is Thr, Gln or Lys
  Variant (28)..(28): Xaa in position 28 is Glu or Asp
  Variant (33)..(33): Xaa in position 33 is Val or Ile
  Variant (37)..(37): Xaa in position 37 is Asn or Asp
  Variant (38)..(38): Xaa in position 38 is Asp or Glu
  Variant (41)..(41): Xaa in position 41 is Thr, Ser or Ala
  Variant (42)..(42): Xaa in position 42 is Ala or Pro
  Variant (43)..(43): Xaa in position 43 is Thr or Asn
  Variant (44)..(44): Xaa in position 44 is Leu or Ile
  Variant (47)..(47): Xaa in position 47 is Leu or Ile
  Variant (48)..(48): Xaa in position 48 is Leu or Lys
  Variant (51)..(51): Xaa in position 51 is Ser, Ala or Lys
  Variant (54)..(54): Xaa in position 54 is Glu, Val or Gln
  Variant (55)..(55): Xaa in position 55 is Val or Ile
  Variant (59)..(59): Xaa in position 59 is Ile or Leu
  Variant (62)..(62): Xaa in position 62 is Glu or Asp
  Variant (65)..(65): Xaa in position 65 is Ile or Val
XTDGXCXKMPSTXXLXVKXKSXPCXEXXGMIWXWPGXXPPXXXXPSXXPPXGFXXHAEXVMXLPX

SEQ ID NO: 137 - protein, 52 aa, Artificial sequence
  consensus sequence
  Variant (1)..(1): Xaa in position 1 is Ser or Asn
  Variant (2)..(2): Xaa in position 2 is Leu or Phe
  Variant (4)..(4): Xaa in position 4 is Lys or Asn
  Variant (9)..(9): Xaa in position 9 is Ala or Ser
  Variant (13)..(13): Xaa in position 13 is Gln or Glu
  Variant (26)..(26): Xaa in position 26 is Arg or Lys
  Variant (30)..(30): Xaa in position 30 is Met or Ile
  Variant (41)..(41): Xaa in position 41 is Gly or Ala
  Variant (46)..(46): Xaa in position 46 is Gln or Lys
  Variant (49)..(49): Xaa in position 49 is Ser, Lys, Glu or Arg
  Variant (50)..(50): Xaa in position 50 is Gln or Glu
  Variant (52)..(52): Xaa in position 52 is Ala, Glu or Ser
XXVXFLTPXSGLXGYWDPYPIDMEFXPPCXVLSTIGISKPXKLEGXSTXXCX

SEQ ID NO: 138 - protein, 30 aa, Artificial sequence
  consensus sequence
  Variant (1)..(1): Xaa in position 1 is Lys or Arg
  Variant (2)..(2): Xaa in position 2 is Gln or Asn
  Variant (7)..(7): Xaa in position 7 is Leu or Ile
  Variant (8)..(8): Xaa in position 8 is Tyr or Ile
  Variant (9)..(9): Xaa in position 9 is Arg or Gln
  Variant (10)..(10): Xaa in position 10 is Met or Asn
  Variant (11)..(11): Xaa in position 11 is Ser or Val
  Variant (12)..(12): Xaa in position 12 is Leu or Pro
  Variant (13)..(13): Xaa in position 13 is Asp or Gly
  Variant (17)..(17): Xaa in position 17 is Val, Ile or Leu
  Variant (19)..(19): Xaa in position 19 is Lys or Gln
  Variant (20)..(20): Xaa in position 20 is His, Asn or Tyr
  Variant (21)..(21): Xaa in position 21 is Ile, Leu or Val
  Variant (23)..(23): Xaa in position 23 is Phe or Leu
  Variant (25)..(25): Xaa in position 25 is Gln, Glu, His or Lys
  Variant (26)..(26): Xaa in position 26 is His, Ile or Tyr
  Variant (30)..(30): Xaa in position 30 is Tyr or His
XXKTRLXXXXXXXFAPXLXXXPXMXXLWRX

SEQ ID NO: 139 - protein, 59 aa, Artificial sequence
  consensus sequence
  Variant (1)..(1): Xaa in position 1 is Gln or Lys
  Variant (11)..(11): Xaa in position 11 is Leu or Val
  Variant (15)..(15): Xaa in position 15 is Glu or Asp
  Variant (18)..(18): Xaa in position 18 is Asn, Leu or Ile
  Variant (21)..(21): Xaa in position 21 is Ala or Glu
  Variant (23)..(23): Xaa in position 23 is Val or Ile
  Variant (26)..(26): Xaa in position 26 is Phe or Met
  Variant (29)..(29): Xaa in position 29 is Ser or Ala
  Variant (39)..(39): Xaa in position 39 is Leu or Met
  Variant (42)..(42): Xaa in position 42 is Asn, Asp or Thr
  Variant (44)..(44): Xaa in position 44 is Leu or Val
  Variant (45)..(45): Xaa in position 45 is Glu, Asp or Arg
  Variant (46)..(46): Xaa in position 46 is Gln, Arg or Glu
  Variant (48)..(48): Xaa in position 48 is Thr, Asp, Ala or Ser
  Variant (49)..(49): Xaa in position 49 is Lys or Asp
  Variant (50)..(50): Xaa in position 50 is Gln or Lys
  Variant (51)..(51): Xaa in position 51 is Pro or Leu
  Variant (55)..(55): Xaa in position 55 is Lys, Gly or Pro
  Variant (56)..(56): Xaa in position 56 is Gln or no amino acid
  Variant (57)..(57): Xaa in position 57 is His or no amino acid
  Variant (58)..(58): Xaa in position 58 is Ile or no amino acid
  Variant (59)..(59): Xaa in position 59 is Asp or no amino acid
XVLNEDLRLVXGQQXRMXNGXNXWNXPVXYDKLGVRYRXWRXAXXXGXXXXPFSXXXXX

SEQ ID NO: 140 - protein, 16 aa, Artificial sequence
  consensus sequence
  Variant (4)..(4): Xaa in position 4 is Glu or Asp
  Variant (8)..(8): Xaa in position 8 is Gln, His, Asn, Glu, Asp or Lys
  Variant (9)..(9): Xaa in position 9 is Phe or Ala
  Variant (11)..(11): Xaa in position 11 is Glu, Gln or Lys
  Variant (12)..(12): Xaa in position 12 is Gln, Lys or Ser
  Variant (13)..(13): Xaa in position 13 is Leu or Val
  Variant (14)..(14): Xaa in position 14 is Val or Ala
  Variant (15)..(15): Xaa in position 15 is Thr, Ser, Val, Met, Ala or Lys
  Variant (16)..(16): Xaa in position 16 is Gly, Ser, Leu, Ala, Thr or Gly
ERYXEMVXXMXXXXXX

SEQ ID NO: 141 - protein, 45 aa, Artificial sequence
  consensus sequence
  Variant (2)..(2): Xaa in position 2 is Ser or Gly
  Variant (4)..(4): Xaa in position 4 is Lys or Gly
  Variant (6)..(6): Xaa in position 6 is Asp or Glu
  Variant (7)..(7): Xaa in position 7 is Glu, Asp, Val or Ala
  Variant (8)..(8): Xaa in position 8 is His or Asn
  Variant (9)..(9): Xaa in position 9 is Val or Ala
  Variant (10)..(10): Xaa in position 10 is Ser, Thr, Lys or Met
  Variant (11)..(11): Xaa in position 11 is Leu, Arg or Thr
  Variant (12)..(12): Xaa in position 12 is Val or Ile
  Variant (13)..(13): Xaa in position 13 is Lys or Arg
  Variant (14)..(14): Xaa in position 14 is Asp, Gly, His or Glu
  Variant (17)..(17): Xaa in position 17 is Ser or Gln
  Variant (19)..(19): Xaa in position 19 is Val or Ile
  Variant (21)..(21): Xaa in position 21 is Ser, Thr, Gly or Asn
  Variant (24)..(24): Xaa in position 24 is Ser or Thr
  Variant (25)..(25): Xaa in position 25 is Ser, Thr, Gln, Asn, Lys or Asp
  Variant (26)..(26): Xaa in position 26 is Val or Ile
  Variant (28)..(28): Xaa in position 28 is Ser, Glu, Ala, Lys or Asp
  Variant (29)..(29): Xaa in position 29 is Gly, Ser or Asp
  Variant (31)..(31): Xaa in position 31 is Leu or Met
  Variant (32)..(32): Xaa in position 32 is Lys, Asn or Ala
  Variant (33)..(33): Xaa in position 33 is Leu or Val
  Variant (34)..(34): Xaa in position 34 is Leu, Ile or Met
  Variant (35)..(35): Xaa in position 35 is Asp or Glu
  Variant (36)..(36): Xaa in position 36 is Ser, Glu or Thr
  Variant (37)..(37): Xaa in position 37 is His, Asn or Lys
  Variant (39)..(39): Xaa in position 39 is Ile, Val or Leu
  Variant (40)..(40): Xaa in position 40 is Pro or Gly
  Variant (41)..(41): Xaa in position 41 is Ser or Ala
  Variant (42)..(42): Xaa in position 42 is Ala, Val, Ser or Thr
  Variant (43)..(43): Xaa in position 43 is Ala, Thr, Phe or Ser
  Variant (44)..(44): Xaa in position 44 is Ala, Ser or Thr
  Variant (45)..(45): Xaa in position 45 is Ser or Gly
EXRXNXXXXXXXXXYRXKXEXELXXXCXXIXXXXXXXLXXXXXXX

SEQ ID NO: 142 - protein, 39 aa, Artificial sequence
  consensus sequence
  Variant (1)..(1): Xaa in position 1 is His or Tyr
  Variant (4)..(4): Xaa in position 4 is Met or Leu
  Variant (9)..(9): Xaa in position 9 is Ser, Val or Thr
  Variant (11)..(11): Xaa in position 11 is Asp, Glu, Asn, Ser or Ala
  Variant (12)..(12): Xaa in position 12 is Glu, Asp or His
  Variant (13)..(13): Xaa in position 13 is Arg or Lys
  Variant (15)..(15): Xaa in position 15 is Thr, Ala or Glu
  Variant (18)..(18): Xaa in position 18 is Glu or Asp
  Variant (19)..(19): Xaa in position 19 is Asp, Gln, Asn, Ser or Ala
  Variant (20)..(20): Xaa in position 20 is Thr or Ser
  Variant (21)..(21): Xaa in position 21 is Met or Leu
  Variant (22)..(22): Xaa in position 22 is Leu, Gly, Val, Ile, Lys, Ser or Asn
  Variant (23)..(23): Xaa in position 23 is Ala or Ser
  Variant (25)..(25): Xaa in position 25 is Lys or Gln
  Variant (26)..(26): Xaa in position 26 is Ala, Leu or Ser
  Variant (28)..(28): Xaa in position 28 is Ser or Gln
  Variant (29)..(29): Xaa in position 29 is Asp or no amino acid
  Variant (30)..(30): Xaa in position 30 is Ile, Val or Thr
  Variant (32)..(32): Xaa in position 32 is Ala, Val, Ser, Asn or Leu
  Variant (33)..(33): Xaa in position 33 is Ala, Thr, Gly, Glu or Ser
  Variant (34)..(34): Xaa in position 34 is Asp or Glu
  Variant (35)..(35): Xaa in position 35 is Met or Leu
  Variant (36)..(36): Xaa in position 36 is Ala, Pro or Ser
XRYXAEFKXGXXXKXAAXXXXXXYXXAXXXAXXXXXPTH

SEQ ID NO: 143 - protein, 13 aa, Artificial sequence
  consensus sequence
  Variant (1)..(1): Xaa in position 1 is Leu or Met
  Variant (3)..(3): Xaa in position 3 is Ser or Gln
  Variant (4)..(4): Xaa in position 4 is Ser or Pro
  Variant (5)..(5): Xaa in position 5 is Asp or Glu
  Variant (6)..(6): Xaa in position 6 is Lys or Arg
  Variant (9)..(9): Xaa in position 9 is Asn, Asp, Ser, Ala or His
  Variant (10)..(10): Xaa in position 10 is Met or Leu
  Variant (11)..(11): Xaa in position 11 is Ala or Arg
  Variant (12)..(12): Xaa in position 12 is Lys or Asn
  Variant (13)..(13): Xaa in position 13 is Gln or Arg
XNXXXXACXXXXX

SEQ ID NO: 144 - protein, 23 aa, Artificial sequence
  consensus sequence
  Variant (3)..(3): Xaa in position 3 is Leu or Lys
  Variant (4)..(4): Xaa in position 4 is Met or Tyr
  Variant (7)..(7): Xaa in position 7 is Arg or Lys
  Variant (12)..(12): Xaa in position 12 is Tyr or Phe
  Variant (19)..(19): Xaa in position 19 is Val or Ile
HSXXLLXKKWLXGILDDFXTKQL

SEQ ID NO: 145 - protein, 20 aa, Artificial sequence
  consensus sequence
  Variant (1)..(1): Xaa in position 1 is Gly or Ser
  Variant (3)..(3): Xaa in position 3 is Asn or Ser
  Variant (4)..(4): Xaa in position 4 is Ser or Ala
  Variant (5)..(5): Xaa in position 5 is Glu or Ile
  Variant (6)..(6): Xaa in position 6 is Asn or Pro
  Variant (7)..(7): Xaa in position 7 is Arg or Pro
  Variant (8)..(8): Xaa in position 8 is Thr or Val
  Variant (9)..(9): Xaa in position 9 is Ser or Arg
  Variant (10)..(10): Xaa in position 10 is Arg or Asp
  Variant (11)..(11): Xaa in position 11 is Leu or Val
  Variant (12)..(12): Xaa in position 12 is Asp or His
  Variant (14)..(14): Xaa in position 14 is Gln or Ser
  Variant (16)..(16): Xaa in position 16 is Arg or Val
XVXXXXXXXXXXSXDXISFS

SEQ ID NO: 146 - protein, 37 aa, Artificial sequence
  consensus sequence
  Variant (1)..(1): Xaa in position 1 is Thr or Ser
  Variant (3)..(3): Xaa in position 3 is Val or Ile
  Variant (9)..(9): Xaa in position 9 is Asp or Gly
  Variant (10)..(10): Xaa in position 10 is Ile or Leu
  Variant (13)..(13): Xaa in position 13 is Thr or Ile
  Variant (14)..(14): Xaa in position 14 is Val or Ala
  Variant (15)..(15): Xaa in position 15 is Cys or Ser
  Variant (20)..(20): Xaa in position 20 is Lys or Arg
  Variant (23)..(23): Xaa in position 23 is Glu or no amino acid
  Variant (24)..(24): Xaa in position 24 is Leu or Val
  Variant (25)..(25): Xaa in position 25 is Asp or Val
  Variant (26)..(26): Xaa in position 26 is Ile or Asp
  Variant (27)..(27): Xaa in position 27 is Lys or Glu
  Variant (29)..(29): Xaa in position 29 is Leu or Asp
  Variant (33)..(33): Xaa in position 33 is Asn or Cys
  Variant (37)..(37): Xaa in position 37 is Phe or Tyr
XSXFRVLRXXWPXXXGRLSXPSXXXXXEXGSGXGIFX

SEQ ID NO: 147 - protein, 50 aa, Artificial sequence
  consensus sequence
  Variant (5)..(5): Xaa in position 5 is Lys or Val
  Variant (6)..(6): Xaa in position 6 is Arg or Lys
  Variant (7)..(7): Xaa in position 7 is Ala or Val
  Variant (8)..(8): Xaa in position 8 is Ala or Leu
  Variant (10)..(10): Xaa in position 10 is Leu or Met
  Variant (12)..(12): Xaa in position 12 is Thr or Gly
  Variant (13)..(13): Xaa in position 13 is Asn or Lys
  Variant (14)..(14): Xaa in position 14 is Gly or Asp
  Variant (16)..(16): Xaa in position 16 is Thr or Lys
  Variant (17)..(17): Xaa in position 17 is Ser or His
  Variant (19)..(19): Xaa in position 19 is Glu or Asp
  Variant (20)..(20): Xaa in position 20 is Ala or Thr
  Variant (21)..(21): Xaa in position 21 is Gly or Arg
  Variant (23)..(23): Xaa in position 23 is Ile or Leu
  Variant (26)..(26): Xaa in position 26 is Val or Thr
  Variant (27)..(27): Xaa in position 27 is His or Arg
  Variant (30)..(30): Xaa in position 30 is Thr or Ala
  Variant (34)..(34): Xaa in position 34 is Asn or Ser
  Variant (38)..(38): Xaa in position 38 is Val or Asn
  Variant (44)..(44): Xaa in position 44 is Asp or Glu
  Variant (45)..(45): Xaa in position 45 is Glu or Gly
  Variant (47)..(47): Xaa in position 47 is Gly or Asn
EEAEXXXXKXYXXXEXXAXXXNXLDXXLKXILEXVRLXYLLERXXSXWDA

SEQ ID NO: 148 - protein, 35 aa, Artificial sequence
  consensus sequence
  Variant (1)..(1): Xaa in position 1 is Arg, His or Lys
  Variant (21)..(21): Xaa in position 21 is Gln or His
  Variant (24)..(24): Xaa in position 24 is Arg or Gly
  Variant (25)..(25): Xaa in position 25 is Val or Leu
  Variant (27)..(27): Xaa in position 27 is Lys or Thr
  Variant (28)..(28): Xaa in position 28 is Asp or Ser
  Variant (31)..(31): Xaa in position 31 is Val or Ile
  Variant (33)..(33): Xaa in position 33 is Phe or Val
  Variant (34)..(34): Xaa in position 34 is Ile or Val
XPKFGILDECTNATSVDVEEXLYXXAXXMGXTXXT

SEQ ID NO: 149 - protein, 14 aa, Artificial sequence
  consensus sequence
MFIYCLISTGSGSR

SEQ ID NO: 150 - protein, 59 aa, Artificial sequence
  consensus sequence
  Variant (2)..(2): Xaa in position 2 is Gly or Ala
  Variant (3)..(3): Xaa in position 3 is Pro or Ile
  Variant (5)..(5): Xaa in position 5 is Ile or Leu
  Variant (6)..(6): Xaa in position 6 is Phe or Leu
  Variant (7)..(7): Xaa in position 7 is Ser or Pro
  Variant (8)..(8): Xaa in position 8 is Ser or Arg
  Variant (9)..(9): Xaa in position 9 is His or Pro
  Variant (10)..(10): Xaa in position 10 is Ala or Phe
  Variant (11)..(11): Xaa in position 11 is His or Ile
  Variant (13)..(13): Xaa in position 13 is His or Leu
  Variant (15)..(15): Xaa in position 15 is Leu or Thr
  Variant (16)..(16): Xaa in position 16 is Pro or Ser
  Variant (17)..(17): Xaa in position 17 is Tyr or Lys
  Variant (18)..(18): Xaa in position 18 is Ala or Ser
  Variant (19)..(19): Xaa in position 19 is Ala or Phe
  Variant (22)..(22): Xaa in position 22 is Asn or Ser
  Variant (24)..(24): Xaa in position 24 is Asn or Arg
  Variant (25)..(25): Xaa in position 25 is Ser or Val
  Variant (26)..(26): Xaa in position 26 is Ser or Phe
  Variant (27)..(27): Xaa in position 27 is Leu or Ser
  Variant (30)..(30): Xaa in position 30 is Arg or Leu
  Variant (31)..(31): Xaa in position 31 is Arg or Ser
  Variant (32)..(32): Xaa in position 32 is Ala or Cys
  Variant (33)..(33): Xaa in position 33 is Gln or Ser
  Variant (34)..(34): Xaa in position 34 is Phe or Ser
  Variant (35)..(35): Xaa in position 35 is Ile or Ser
  Variant (37)..(37): Xaa in position 37 is Phe or Asn
  Variant (38)..(38): Xaa in position 38 is Ala or Gly
  Variant (40)..(40): Xaa in position 40 is Ala or Asn
  Variant (41)..(42): Xaa in position 41 to 42 is Ser or no amino acid
  Variant (43)..(44): Xaa in position 43 to 44 is Pro or no amino acid
  Variant (45)..(45): Xaa in position 45 is Gln or no amino acid
  Variant (46)..(46): Xaa in position 46 is Pro or no amino acid
  Variant (47)..(47): Xaa in position 47 is Arg or no amino acid
  Variant (48)..(48): Xaa in position 48 is Pro or no amino acid
  Variant (49)..(49): Xaa in position 49 is Gln or no amino acid
  Variant (51)..(51): Xaa in position 51 is Gly or Asn
  Variant (52)..(52): Xaa in position 52 is Phe or Gln
  Variant (53)..(53): Xaa in position 53 is Lys or Gln
  Variant (54)..(54): Xaa in position 54 is Asp or Val
  Variant (55)..(56): Xaa in position 55 to 56 is Glu or Ser
  Variant (57)..(57): Xaa in position 57 is Ala or Asn
  Variant (58)..(58): Xaa in position 58 is Thr or Pro
  Variant (59)..(59): Xaa in position 59 is Ala or Glu
MXXSXXXXXXXSXRXXXXXNLXPXXXXLRXXXXXXSXXSXXXXXXXXXXGXXXXXXXXX

SEQ ID NO: 151 - protein, 75 aa, Artificial sequence
  consensus sequence
  Variant (1)..(1): Xaa in position 1 is Val or Ala
  Variant (5)..(5): Xaa in position 5 is Glu or Asp
  Variant (6)..(6): Xaa in position 6 is Leu or Met
  Variant (8)..(8): Xaa in position 8 is Leu or Ile
  Variant (10)..(10): Xaa in position 10 is Leu or Val
  Variant (12)..(12): Xaa in position 12 is Thr or Ser
  Variant (15)..(15): Xaa in position 15 is Ile or Leu
  Variant (17)..(17): Xaa in position 17 is Ser or Lys
  Variant (18)..(18): Xaa in position 18 is Arg or Ser
  Variant (20)..(20): Xaa in position 20 is Lys or Gln
  Variant (21)..(21): Xaa in position 21 is Gly or Arg
  Variant (22)..(22): Xaa in position 22 is Ser or Thr
  Variant (23)..(24): Xaa in position 23 to 24 is Ser or Pro
  Variant (25)..(25): Xaa in position 25 is Leu or Ser
  Variant (26)..(26): Xaa in position 26 is Ala or Asp
  Variant (28)..(28): Xaa in position 28 is Gly or Asp
  Variant (29)..(29): Xaa in position 29 is Ser or no amino acid
  Variant (30)..(30): Xaa in position 30 is Gly or no amino acid
  Variant (31)..(31): Xaa in position 31 is Ser or no amino acid
  Variant (32)..(32): Xaa in position 32 is Val or no amino acid
  Variant (33)..(33): Xaa in position 33 is Gly or no amino acid
  Variant (34)..(34): Xaa in position 34 is Met or no amino acid
  Variant (35)..(35): Xaa in position 35 is Phe or no amino acid
  Variant (36)..(36): Xaa in position 36 is Glu or no amino acid
  Variant (37)..(38): Xaa in position 37 to 38 is Asn or no amino acid
  Variant (39)..(39): Xaa in position 39 is Ser or no amino acid
  Variant (40)..(40): Xaa in position 40 is Glu or no amino acid
  Variant (45)..(45): Xaa in position 45 is Ala or Thr
  Variant (47)..(47): Xaa in position 47 is Val or Ile
  Variant (51)..(51): Xaa in position 51 is Ile or Val
  Variant (54)..(54): Xaa in position 54 is Asp or Glu
  Variant (55)..(55): Xaa in position 55 is Val or Met
  Variant (56)..(56): Xaa in position 56 is Val or Ile
  Variant (68)..(68): Xaa in position 68 is Arg or Lys
  Variant (69)..(69): Xaa in position 69 is Glu, Asn or Thr
  Variant (70)..(70): Xaa in position 70 is Arg if Xaa in position 69 is Asn, Ile if Xaa in position 69 is Thr, or no amino acid
  Variant (71)..(71): Xaa in position 71 is Tyr if Xaa in position 69 is Asn, Ser if Xaa in position 69 is Thr, or no amino acid
  Variant (72)..(72): Xaa in position 72 is Arg or Ser
  Variant (73)..(73): Xaa in position 73 is Arg or Lys
  Variant (74)..(74): Xaa in position 74 is Leu, Val or Ala
  Variant (75)..(75): Xaa in position 75 is Val or Ile
XATGXXFXGXAXRLXKXXNXXXXXXXEXXXXXXXXXXXXXERIGXVXEDEXDPXXXWEQRVKDVEAEXXXXXXXX

SEQ ID NO: 152 - protein, 50 aa, Artificial sequence
  consensus sequence
  Variant (1)..(1): Xaa in position 1 is Phe or Leu
  Variant (4)..(4): Xaa in position 4 is Gln or Glu
  Variant (5)..(5): Xaa in position 5 is Asn or Lys
  Variant (10)..(10): Xaa in position 10 is Glu or Asp
  Variant (17)..(17): Xaa in position 17 is Ser or Ala
  Variant (26)..(26): Xaa in position 26 is Val or Thr
  Variant (27)..(27): Xaa in position 27 is Ile or Val
  Variant (28)..(28): Xaa in position 28 is Ala or Thr
  Variant (32)..(32): Xaa in position 32 is Ser or Thr
  Variant (34)..(34): Xaa in position 34 is Glu or Gln
  Variant (38)..(38): Xaa in position 38 is Asn, Gln or Glu
  Variant (39)..(39): Xaa in position 39 is Ala or Leu
  Variant (42)..(42): Xaa in position 42 is Ile, Val or Thr
  Variant (45)..(45): Xaa in position 45 is Glu, His or Gln
  Variant (49)..(49): Xaa in position 49 is Asn, Arg, Leu or Ser
  Variant (50)..(50): Xaa in position 50 is Arg, Asn or Lys
XLIXXGYIKXTTPLAGXSAGAIVCAXXXSGAXMXEALXXTKXLAXDCRXX

SEQ ID NO: 153 - protein, 52 aa, Artificial sequence
  consensus sequence
  Variant (1)..(1): Xaa in position 1 is Asp or Glu
  Variant (2)..(2): Xaa in position 2 is Ile, Ser or Val
  Variant (3)..(3): Xaa in position 3 is Leu or Met
  Variant (4)..(4): Xaa in position 4 is Asp or Glu
  Variant (5)..(5): Xaa in position 5 is Lys or Gln
  Variant (6)..(6): Xaa in position 6 is Phe or Leu
  Variant (11)..(11): Xaa in position 11 is Val, Ile or Ala
  Variant (23)..(23): Xaa in position 23 is Val or Ile
  Variant (26)..(26): Xaa in position 26 is Leu, Val or Ile
  Variant (29)..(29): Xaa in position 29 is Arg or Lys
  Variant (39)..(39): Xaa in position 39 is Asp or Asn
  Variant (42)..(42): Xaa in position 42 is Glu or Ser
  Variant (49)..(49): Xaa in position 49 is Phe, Asn or Ile
  Variant (52)..(52): Xaa in position 52 is Ser or Ala
XXXXXXLPDDXHIRSNGRVRVAXTQXLWXPRGLLVDQFXSKXDLINAVXTSX

SEQ ID NO: 154 - protein, 88 aa, Artificial sequence
  consensus sequence
  Variant (1)..(1): Xaa in position 1 is Ser or Ala
  Variant (3)..(3): Xaa in position 3 is Ala or Asp
  Variant (4)..(4): Xaa in position 4 is Gln or Lys
  Variant (6)..(6): Xaa in position 6 is Val or Ile
  Variant (7)..(7): Xaa in position 7 is Arg or Gln
  Variant (12)..(12): Xaa in position 12 is Pro or Ser
  Variant (15)..(15): Xaa in position 15 is Arg or Asn
  Variant (16)..(16): Xaa in position 16 is Leu or Phe
  Variant (17)..(17): Xaa in position 17 is Gly or Lys
  Variant (19)..(19): Xaa in position 19 is Gln or Lys
  Variant (30)..(30): Xaa in position 30 is Glu or Leu
  Variant (32)..(32): Xaa in position 32 is Val or Lys
  Variant (33)..(33): Xaa in position 33 is Cys or Ala
  Variant (34)..(34): Xaa in position 34 is Ser or Thr
  Variant (35)..(35): Xaa in position 35 is Pro or Ala
  Variant (39)..(39): Xaa in position 39 is Phe or Leu
  Variant (40)..(40): Xaa in position 40 is Asn or Lys
  Variant (49)..(49): Xaa in position 49 is Ala or Glu
  Variant (50)..(50): Xaa in position 50 is Ile or Val
  Variant (52)..(52): Xaa in position 52 is Asp or Glu
  Variant (53)..(53): Xaa in position 53 is Arg or Lys
  Variant (54)..(54): Xaa in position 54 is Phe or Leu
  Variant (60)..(60): Xaa in position 60 is Leu or Ala
  Variant (63)..(63): Xaa in position 63 is Ser or Ala
  Variant (64)..(64): Xaa in position 64 is Val or Thr
  Variant (66)..(66): Xaa in position 66 is Ala or Ser
  Variant (67)..(67): Xaa in position 67 is Lys or Glu
  Variant (68)..(68): Xaa in position 68 is Glu or Met
  Variant (72)..(72): Xaa in position 72 is Glu or Asp
  Variant (73)..(73): Xaa in position 73 is Val or Glu
  Variant (74)..(74): Xaa in position 74 is Ile or Leu
  Variant (76)..(76): Xaa in position 76 is Gln or Tyr
  Variant (79)..(79): Xaa in position 79 is Ser or Thr
  Variant (82)..(82): Xaa in position 82 is Phe or Ala
  Variant (83)..(83): Xaa in position 83 is Gly or Gln
  Variant (84)..(84): Xaa in position 84 is Ser or Ala
  Variant (85)..(85): Xaa in position 85 is Ser or Ile
  Variant (86)..(86): Xaa in position 86 is Ser or Gln
  Variant (88)..(88): Xaa in position 88 is Thr or Ser
XAXXTXXVCAFXASXXXLXGIGISPDCNPXNXXXXRQLXXWALEPAEDXXLXXXFELGYXDAXXWXXXNPVXXXVXDDXPAXXXXXAX

SEQ ID NO: 155 - DNA, 811 bp, Artificial Sequence
  RNAi construct
ggagagtgtacagatagatatacctgagagggagatggataatagctctgtctcaggacatgaagatgataatgatgataatgatgatgaagaagaagaacataagggctcggttccggttaaagattccggtttacaagattcttgtagtgtaatagatgcttagactgatttgatccgagtgaagagattcttgttcagcaaagatcttggagtgttttagtgctttgtaaatagtacaactataggccgcaagtaaggtgcatgttgtgtatgtttgcagtgattatgttgaaaattcaacagtatgcgtttgcggagatgcttgccattgcaggctatttgatcacactgtttggcgacctcatcatccagcggctgatcctccgcggtgctcgttcgtctgcgcagctaggttctttggacggcgaaaaggatggggctgcgaaattagatgagaagggtcgggcagaagtgaatgcgacgctgttacatcgagcttcatttggacaattttcaacataatcactgcaaacatacacaacatgcaccttacttgcggcctatagttgtactatttacaaagcactaaaacactccaagatctttgctgaacaagaatctcttcactcggatcaaatcagtctaagcatctattacactacaagaatcttgtaaaccggaatctttaaccggaaccgagcccttatgttcttcttcttcatcatcattatcatcattatcatcttcatgtcctgagacagagctattatccatctccctctcaggtatatctatctgtacactctcc

SEQ ID NO: 156 - DNA, 811 bp, Artificial Sequence
  RNAi construct
atggatataagcaacgaggccaatgtcgatcccttctcaatcggaccaacctccatcctcggccgaaccatcgccttccgagtcctcttctgcaaatcaatgctccagctccgccgcgacctcttccgcttcctcctccactggttcctcacactcaagctcgccgtctccccctttgtctcctggttccacccccggaacccccaggggatcctcgccgtcgtcacgatcatcgccttcgtcctgaaacgctacaccaacgtgaaggccaaggccgagatggcctaccgtagaaagttccaacagtatgcgtttgcggagatgcttgccattgcaggctatttgatcacactgtttggcgacctcatcatccagcggctgatcctccgcggtgctcgttcgtctgcgcagctaggttctttggacggcgaaaaggatggggctgcgaaattagatgagaagggtcgggcagaagtgaatgcgacgctgttacatcgagcttcatttggacgaactttctacggtaggccatctcggccttggccttcacgttggtgtagcgtttcaggacgaaggcgatgatcgtgacgacggcgaggatcccctgggggttccgggggtggaaccaggagacaaagggggagacggcgagcttgagtgtgaggaaccagtggaggaggaagcggaagaggtcgcggcggagctggagcattgatttgcagaagaggactcggaaggcgatggttcggccgaggatggaggttggtccgattgagaagggatcgacattggcctcgttgcttatatccat

SEQ ID NO: 157 - DNA, 847 bp, Artificial Sequence
  RNAi construct
cgacacaaagttcagggcactattggaccattctctcatgctcttgaagaagaaatggttgtatggcatacttgatgatttcgtgacaaagcaacttcccaataatgtgacttggggattaagtttgttgtatgctttagaacacaagggagatagagcacttgtctccactcaaggtgaattggcacatgcattgcggtatctagcttctgtcgtctcccaaagctttatggcgtttggtgatattcttgaactacacaagaagttccttgagctctctggtggtattaacagaattttcgttaattaaaatttaaatcaacagtatgcgtttgcggagatgcttgccattgcaggctatttgatcacactgtttggcgacctcatcatccagcggctgatcctccgcggtgctcgttcgtctgcgcagctaggttctttggacggcgaaaaggatggggctgcgaaattagatgagaagggtcgggcagaagtgaatgcgacgctgttacatcgagcttcatttggactttaattaaggtacccgaaaattctgttaataccaccagagagctcaaggaacttcttgtgtagttcaagaatatcaccaaacgccataaagctttgggagacgacagaagctagataccgcaatgcatgtgccaattcaccttgagtggagacaagtgctctatctcccttgtgttctaaagcatacaacaaacttaatccccaagtcacattattgggaagttgctttgtcacgaaatcatcaagtatgccatacaaccatttcttcttcaagagcatgagagaatggtccaatagtgccctgaactttgtgtcg

SEQ ID NO: 158 - DNA, 877 bp, Artificial Sequence
  RNAi construct
atgaacgccgccgtgtttacttcttctgctttatctctacccatatccttctgtaagactagatcatctcaactcaccagaaagaagggagtgaaaggagagttcagggtttttgctgtgtttggggaagatagtggattagttgagaagaagagtcaatgggggcatttgtttgatgtggaggatcccagatcgaaaactcctccttataaaggcaagttcatggatgtaaaccaagctcttgaagttgctaggttcgatatccaatatttggattggcgtgctcgtcaagatcttcttaccatcatgctcctttaacctaaaggcctcaacagtatgcgtttgcggagatgcttgccattgcaggctatttgatcacactgtttggcgacctcatcatccagcggctgatcctccgcggtgctcgttcgtctgcgcagctaggttctttggacggcgaaaaggatggggctgcgaaattagatgagaagggtcgggcagaagtgaatgcgacgctgttacatcgagcttcatttggacctcgagttaggcctttaggttaaaggagcatgatggtaagaagatcttgacgagcacgccaatccaaatattggatatcgaacctagcaacttcaagagcttggtttacatccatgaacttgcctttataaggaggagttttcgatctgggatcctccacatcaaacaaatgcccccattgactcttcttctcaactaatccactatcttccccaaacacagcaaaaaccctgaactctcctttcactcccttctttctggtgagttgagatgatctagtcttacagaaggatatgggtagagataaagcagaagaagtaaacacggcggcgttcat

SEQ ID NO: 159 - DNA, 738 bp, Glycine max
  CDS (1)..(738)
ggaagaattccttcgtggaattgcattgcacgagagaattcgaccggctcccttgaggaccttactgatgttgcctcctcattgcatcaaggcatcggcagttccagcagagccaatggcaaaacttggaagacccaccgtggcatacatgatggaagtgacagtgactctgaaagtgttgatttgcattcttggacaagaactggcgggcctttgatgagaactacttcagcaaatatgttcgttgattttctccaaaacttagaggttgatacggatcctaataaaggcttagtgagtcacactatccataatgattttcagtatcatagccccaggctcacaacactagataggaactctgatagcacagaatctgagccaagggaaactggcaacagggttgtcaatgtgtccagcatacttgtgaccgaaggtgatcttctgcagcctgaaaggatccataatgggattgtgtttaatgttgtcaagaaagaagacttgtcacccttaagtagtagcagtcatggttttgaaaattacaacattgaagttgctgaatgtgtccaagatgagtgtccagggaaggagatagatgctgctagctctgcatctgaacacggagatgatgaagaatccatgccagccaggtccttaactgacatgccagattacaattccattgatcatcattcgggcacagattcgggtatggatcaaagcattgttgacagttag

SEQ ID NO: 160 - protein, 245 aa, Glycine max
GRIPSWNCIARENSTGSLEDLTDVASSLHQGIGSSSRANGKTWKTHRGIHDGSDSDSESVDLHSWTRTGGPLMRTTSANMFVDFLQNLEVDTDPNKGLVSHTIHNDFQYHSPRLTTLDRNSDSTESEPRETGNRVVNVSSILVTEGDLLQPERIHNGIVFNVVKKEDLSPLSSSSHGFENYNIEVAECVQDECPGKEIDAASSASEHGDDEESMPARSLTDMPDYNSIDHHSGTDSGMDQSIVDS

SEQ ID NO: 161 - DNA, 1530 bp, Glycine max
  CDS (1)..(1530)
atgttttttatgcgtgccgatcttattagaaatttaggtaatatgtgtaaccctgaactacacaagggtaggcttcaggtgcctaaattaatcaaggagtacattgatgaagtaacgactcaattgagaatggtctgtgattctgattcagaggagctatcattggaagaaaagcttgctttcatgcatgaaactaggcatgcatttgggaggactgctttgctgttaagtgggggtgcctctcttggagcttctcatgtgggtgtagttaaaacactggtagaacataaactcatgcctaggataattgctggttcaagtgtgggatccattatgtgtgctgttgttgccactaggacttggcctgagctccagagcttttttgaggattcatggcactcattgcaattttttgatcaaatgggtgggatttttgcagttgttaagagagtcacaacattgggtgctgttcatgagatcagacagttgcaaatgatgttgaggcatctaacaagcaatcttacatttcaagaagcttatgacatgacaggtagaattcttgggattacagtttgttccccaaggaagcatgaaccacctagatgtcttaactacttgacttcaccccatgttgtaatatggagcgcagttactgcttcttgtgcctttcctggccttttcgaggctcaggaattgatggcaaaggatagaagtggagagattattccttaccaccctccttttaacttaggtcctgaagagggctccacaccagcacgccgttggagggatggtagcttggagattgatttacctatgatgcagttgaaagaactattcaatgtcaatcattttatagttagtcaggccaaccctcatattgcaccattattgagattgaaagaatttgtgcgcacttatgggggcaacttcgctgccaagcttgctcatcttgtggagatggaggtgaaacataggtgtcatcaaatactggaacttggttttccattaggtggacttgctaaattgtttgctcaagactgggaaggtgatgtgactgttgttattcccgcaactcttgctcagtacaccaaaattatacagaacccttcttatggagagcttcaaaaggcagccaaccaagggagaagatgtacctgggagaaactttcagccataaaagcaaattgtggcattgagcttgctcttgatgagtgtgttgtgattctcaatcatatgagaagactaaagagaattgctgagagagctgcttctgcttctcatggtttgtccagcactgtaaggttcagtgcttcaaaaagaattccttcatggaattgcattgcacgagagaattcaactggttcccttgaggaccttactgatgttgctgcctcaaagcatcaaggcattagcagttcctgtggaaccaatggcaaaacttggaagacctaccgtggcatacttgatggaagtgacagtgactctgaaagtgttgatttgcattcttggacaagatctgtatcgtag

SEQ ID NO: 162 - protein, 509 aa, Glycine max
MFFMRADLIRNLGNMCNPELHKGRLQVPKLIKEYIDEVTTQLRMVCDSDSEELSLEEKLAFMHETRHAFGRTALLLSGGASLGASHVGVVKTLVEHKLMPRIIAGSSVGSIMCAVVATRTWPELQSFFEDSWHSLQFFDQMGGIFAVVKRVTTLGAVHEIRQLQMMLRHLTSNLTFQEAYDMTGRILGITVCSPRKHEPPRCLNYLTSPHVVIWSAVTASCAFPGLFEAQELMAKDRSGEIIPYHPPFNLGPEEGSTPARRWRDGSLEIDLPMMQLKELFNVNHFIVSQANPHIAPLLRLKEFVRTYGGNFAAKLAHLVEMEVKHRCHQILELGFPLGGLAKLFAQDWEGDVTVVIPATLAQYTKIIQNPSYGELQKAANQGRRCTWEKLSAIKANCGIELALDECVVILNHMRRLKRIAERAASASHGLSSTVRFSASKRIPSWNCIARENSTGSLEDLTDVAASKHQGISSSCGTNGKTWKTYRGILDGSDSDSESVDLHSWTRSVS

SEQ ID NO: 163 - DNA, 1926 bp, Glycine max
  CDS (1)..(1926)
atggtctgtgattctgattcagaggagctatcattggaagaaaagcttgctttcatgcatgaaactaggcatgcatttgggaggactgctttgctgttaagtgggggtgcctctcttggagcttctcatgtgggtgtagttaaaacactggtagaacataaactcatgcctaggataattgctggttcaagtgtgggatccattatgtgtgctgttgttgccactaggacttggcctgagctccagagcttttttgaggattcatggcactcattgcaattttttgatcaaatgggtgggatttttgcagttgttaagagagtcacaacattgggtgctgttcatgagatcagacagttgcaaatgatgttgaggcatctaacaagcaaccttacatttcaagaagcttatgacatgacaggcagaattcttgggattactgtttgttccccaaggaagcatgaaccgcctagatgtcttaactacttgacttcaccccatgtggttatatggagtgcagtaaccgcttcttgtgcctttcctggcctttttgaggctcaagaattgatggcaaaggatagaagtggagagattgttccttaccaccctccttttaacttaggccctgaagagggctccacaccagtgcgccgttggagggatggtagcttggagattgatttacctatgatgcagttgaaagaactattcaatgtcaatcattttatagttagtcaggccaaccctcatattgcaccactattgagattgaaagaatttgtgcggacttatgggggcaactttgctgccaagcttgctcatcttgtggagatggaggtgaaacataggtgtcatcaaatactggaacttggttttccattaggtggacttgctaaattgtttgctcaagactgggaaggtgatgtgactgttgttattcccgcaactcttgctcagtacaccaaaattatacagaacccttcttatggagagcttcaaaaggcagccaaccaagggagaagatgtacctgggagaaactttcagccataaaagcaaattgtggcattgagcttgctcttgatgagtgtgttgtgattctcaatcatatgagaagactaaagagaattgctgagagagctgcttctgcctctcatggtttgtccagcactgtcaggttcagtgcttcaaaaagaattccttcgtggaattgcattgcacgagagaattcgaccggctcccttgaggaccttactgatgttgcctcctcattgcatcaaggcatcggcagttccagcagagccaatggcaaaacttggaagacccaccgtggcatacatgatggaagtgacagtgactctgaaagtgttgatttgcattcttggacaagaactggcgggcctttgatgagaactacttcagcaaatatgttcgttgattttctccaaaacttagaggttgatacggatcctaataaaggcttagtgagtcacactatccataatgattttcagtatcatagccccaggctcacaacactagataggaactctgatagcacagaatctgagccaagggaaactggcaacagggttgtcaatgtgtccagcatacttgtgaccgaaggtgatcttctgcagcctgaaaggatccataatgggattgtgtttaatgttgtcaagaaagaagacttgtcacccttaagtagtagcagtcatggttttgaaaattacaacattgaagttgctgaatgtgtccaagatgagtgtccagggaaggagatagatgctgctagctctgcatctgaacacggagatgatgaagaatccatgccagccaggtccttaactgacatgccagattacaattccattgatcatcattcgggcacagattcgggtatggatcaaagcattgttgacagttag

SEQ ID NO: 164 - protein, 641 aa, Glycine max
MVCDSDSEELSLEEKLAFMHETRHAFGRTALLLSGGASLGASHVGVVKTLVEHKLMPRIIAGSSVGSIMCAVVATRTWPELQSFFEDSWHSLQFFDQMGGIFAVVKRVTTLGAVHEIRQLQMMLRHLTSNLTFQEAYDMTGRILGITVCSPRKHEPPRCLNYLTSPHVVIWSAVTASCAFPGLFEAQELMAKDRSGEIVPYHPPFNLGPEEGSTPVRRWRDGSLEIDLPMMQLKELFNVNHFIVSQANPHIAPLLRLKEFVRTYGGNFAAKLAHLVEMEVKHRCHQILELGFPLGGLAKLFAQDWEGDVTVVIPATLAQYTKIIQNPSYGELQKAANQGRRCTWEKLSAIKANCGIELALDECVVILNHMRRLKRIAERAASASHGLSSTVRFSASKRIPSWNCIARENSTGSLEDLTDVASSLHQGIGSSSRANGKTWKTHRGIHDGSDSDSESVDLHSWTRTGGPLMRTTSANMFVDFLQNLEVDTDPNKGLVSHTIHNDFQYHSPRLTTLDRNSDSTESEPRETGNRVVNVSSILVTEGDLLQPERIHNGIVFNVVKKEDLSPLSSSSHGFENYNIEVAECVQDECPGKEIDAASSASEHGDDEESMPARSLTDMPDYNSIDHHSGTDSGMDQSIVDS

SEQ ID NO: 165 - DNA, 1476 bp, Glycine max
  CDS (1)..(1476)
atggtagaacataaactcatgcctaggataattgctggttcaagtgtgggatccattatgtgtgctgttgttgccactaggacttggcctgagctccagagcttttttgaggattcatggcactcgttgcaattttttgatcaaatgggtgggatttttgcagttgttaagagagtcacaacattgggtgctgttcatgagatcagacagttgcaaatgatgttgaggcatctaacaagcaatcttacatttcaagaagcttatgacatgacaggtagaattcttgggattacagtttgttccccaaggaagcacgaaccacctagatgtcttaactacttgacttcaccccatgtggttatatggagtgcagtcaccgcttcttgtgccttccctggcctttttgaggctcaagaattgatggcaaaggatagaagtggagagattattccttaccaccctccttttaacttaggtcctgaagagggctccacaccagcacgccgttggagggatggtagcttggagattgatttacctatgatgcagttgaaagaactattcaatgtcaatcattttatagttagtcaggccaaccctcatattgcaccattattgagattgaaagaatttgtgcgcacttatgggggcaacttcgctgccaagtacaccaaaattatacagaacccttcttatggagagcttcaaaaggcaaccaaccaagggagaagatgtacctgggagaaactttcagccataaaagcaaattgtggcattgagcttgctcttgatgagtgtgtggtgattctcaatcatatgagaagactaaagaggattgctgagagagctgcttctgcttctcaaggtttgtccagcactacctaccgtggcatacttgatggaagtgacagtgactctgaaagtgttgatttgcattcttggacaagatctggtgggcctttgatgagaactacttcagcaaatatgtttgtcgattttcttcaaaacttagacgttgataccgatcaaaacaataaaggcttagtgagtcgtgctaaccctaatgattttcagtatcgtagccccaggctcgcaacactggataggaactctgatagcacagaatctgagccaagggaaattggcaacagggttttcaatgtgtccagcatacttgtgaccgaaggtgatcttttgcagcctgaaaggatccataatgggattgtgtttaatgttgtcaagaaagaagacttgtcacccttaagtggtagcagtcatgattttgaaaattacaacattgaagttgctgaatgtgtccaagatgagtgtccagggaaggagatagatgctgctagctcagcttctgaacatggagatgatgaagaatccacagtagctaggtccttaactgaaactcaagactacaattccatggatcatcattcgggtatggatcagagcattgttgacagttag

SEQ ID NO: 166 - protein, 491 aa, Glycine max
MVEHKLMPRIIAGSSVGSIMCAVVATRTWPELQSFFEDSWHSLQFFDQMGGIFAVVKRVTTLGAVHEIRQLQMMLRHLTSNLTFQEAYDMTGRILGITVCSPRKHEPPRCLNYLTSPHVVIWSAVTASCAFPGLFEAQELMAKDRSGEIIPYHPPFNLGPEEGSTPARRWRDGSLEIDLPMMQLKELFNVNHFIVSQANPHIAPLLRLKEFVRTYGGNFAAKYTKIIQNPSYGELQKATNQGRRCTWEKLSAIKANCGIELALDECVVILNHMRRLKRIAERAASASQGLSSTTYRGILDGSDSDSESVDLHSWTRSGGPLMRTTSANMFVDFLQNLDVDTDQNNKGLVSRANPNDFQYRSPRLATLDRNSDSTESEPREIGNRVFNVSSILVTEGDLLQPERIHNGIVFNVVKKEDLSPLSGSSHDFENYNIEVAECVQDECPGKEIDAASSASEHGDDEESTVARSLTETQDYNSMDHHSGMDQSIVDS

SEQ ID NO: 167 - DNA, 1164 bp, Glycine max
  CDS (1)..(1164)
atgtggttttcaactctgcagcttgctcatctagcagagatggaggtgaaacatagatgtaatcaagtactggaactcggctttccattaggtggactagccaaactgtttgctcaagactgggagggtgatgtaacagttgttatgcctgcaactcctgcccaatacttaaaaatcatacagaacccttcttatgtagagcttcaaaaggcagctaaccaaggcagaagatgcacctgggagaagctttcggccatgaaagcaaattgtggaattgagcttgctcttgatgagtctgttgcaattctcaatcatatgagacgactcaaaagaaatgctgagagaactgctgctgcttctcatggtcttcccagtacaggcaaatttagtggttcaagaagaattccatcgtggaacatcattgcacgagagaattctacaggctccctagaagaccttcatgctgctgctgctgctacttcctcattgcatcaaggtgttattagtcccagtggagccactggtaaaaattggaagtcccaccgtagctttcatgatgcaagtgacagtgaatctgaaagtgctcatgacttgaattcttggaccagatctggtgggcctttgatgagaactacatcagcagatatgttcattgactttttccagaacatagaagttgataccgaactaaatagaggcaaggtgacaaacactaccactagccctcgtgattttcagcatcacatttcaaggcacacaacacctgatcataataggtggtgctctaagagaacagaaatcgatcagaaagaaaatggcaacaggatgattgccatgaatggatctaacataatggtaactgaaggtgatcttttacagcctgaaaggatccataatgggattgtgtttaatgttgtcaagaaacaagactttttgaccccttcaaataggaataatgattataatagttgttgtaacaatgaagttgctgaatgtgtacaaattgaatttccagggaaggaggtggatgctcttagttcagcttccgaaaatggcgatgatggttccacaatggccaggtccctaactgaaaaaccagattataattcaacaaatcatttcagcaaagattttggtgaagatcaaagcattgctgacaattaa

SEQ ID NO: 168 - protein, 387 aa, Glycine max
MWFSTLQLAHLAEMEVKHRCNQVLELGFPLGGLAKLFAQDWEGDVTVVMPATPAQYLKIIQNPSYVELQKAANQGRRCTWEKLSAMKANCGIELALDESVAILNHMRRLKRNAERTAAASHGLPSTGKFSGSRRIPSWNIIARENSTGSLEDLHAAAAATSSLHQGVISPSGATGKNWKSHRSFHDASDSESESAHDLNSWTRSGGPLMRTTSADMFIDFFQNIEVDTELNRGKVTNTTTSPRDFQHHISRHTTPDHNRWCSKRTEIDQKENGNRMIAMNGSNIMVTEGDLLQPERIHNGIVFNVVKKQDFLTPSNRNNDYNSCCNNEVAECVQIEFPGKEVDALSSASENGDDGSTMARSLTEKPDYNSTNHFSKDFGEDQSIADN

SEQ ID NO: 169 - DNA, 2427 bp, Zea mays
  CDS (1)..(2427)
atggacgagtccggggaagcgagcgtcggctccttcaggatcgggccgtcgacgctgctgggccgcggggtggcgttccgcgtgctcctcttcagctcgctgtggcgcctacgggcgcgcgcgtacgcggccatctcgcgcgtgcgcagcgcggcgctgccggtggcggcgtcctggctacacctcaggaacagccacggcgtcctcctcatggccgtgctcctcgccctcttcctgaggaaactctcggccgcgcggtcgcgggcggcgctcgcgcgccgtcgcaggcagcacgagaaggccatgctgcatgccgggacgtacgaggtctgggcgcgcgccgccaaggtgctcgacaagatgtctgagcaggtccacgaggcggatttctacgacgaggagctcatcaggaataggcttgaggaactccggagacggagggaggacgggtcgctccgggacgtggtgttctgtatgcgcggcgatcttgttaggaatttggggaacatgtgcaaccctgaacttcacaagggcaggctagaggttcctaagcttataaaggagtacattgaagaggtttctactcaactaagaatggtgtgcgaatctgacactgacgagttgctgttggaagagaaacttgcctttgttcaggagaccaggcatgcctttgggaggacagcgctactcctaagtgggggtgcttcactcgggtctttccatgtaggtgtagtgaaaacattggttgagcataagcttctgcctcggattatagcaggatcaagcgttggttccatcatatgttcgatcgttgctacccgtacatggcctgagattgagagcttcttcacagactcattacagaccttgcagtttttcgacaggatgggcggaatttttgcagtgatgaggcgtgtcaccacttatggtgcactgcatgacattagccagatgcaaaggcttttgagggatctcacaagtaacttaacatttcaagaggcttatgacatgaccggccgtgttcttgggatcaccgtttgctctcctagaaaaaatgagccaccccgctgcctcaactacctgacggcaccacatgttgttatttggagtgcagtaaccgcctcttgtgcatttcctgggctctttgaagctcaggaactgatggcaaaggataggttcggcaacatcgttcccttccatgcaccctttgccacagatcctgaacaaggtcctggagcatcgaagcgcaggtggagagacgggagcttggagatggatttacccatgatgagacttaaggagttgtttaatgtaaaccatttcattgtgagccaaactaaccctcacatttctccactcctccggatgaaagagcttgttagagcctatggagggcgctttgctggaaagcttgctcgtcttgctgaaatggaggttaagtatcgatgcaaccaaatcctagagatcggtcttccaatgggaggacttgcaaaattgtttgcccaggattgggagggtgatgtgaccatggttatgccagcaacacttgctcagtacttgaagatcattcagaatccaacatacgcggagctccaaatggctgccaaccaaggccgcaggtgcacatgggagaagctctccgcaatcagagcgaactgcgccattgaacttgcactggacgaatccatagcggttgtaaaccacaaacggaggctaaaacgaagcatggagaggacggcggcggcttcacagggtcactctaactatgtccgacccaagactccgaggaggataccgtcatggagccgcatcagtcgagagaactcttcggagtctctcgcggaagagatctctgcggttgctgcttcgtccatgcagcaaggcgctgctcttgttgtcggcgcaccaccaacgactctttctcagcatgttcggcgcagttctcacgacggaagtgagagtgagtcagaaaccattgaccttaattcctggaccaggagtggagggcctctaatgaggacagcgtccgccgacaggttcatcagtttcatccataacattgagattgacacagaattaagtaggccctgtgctgtggaaggtgatgctgcaggtattttgtcagaatctaccttcccaaacgattcacgaccgaacaatagctcaagtgttagtactatgccaggtagatgcacagaaaattctgggaccgagtcgtgcaacactgtcaacaccagagcttctactcccacaagcatggctgttcgtgaaggagatttgctgccgcctgaaagcactactgatggtgtcctacttaacattgtgaaaagagacgccctgcaggatggtgtaattgaattggtggaaagctcctgcgctgaaggatatgcggcaaactgtgacaccgtctcagggctagactgctga

SEQ ID NO: 170 - protein, 808 aa, Zea mays
MDESGEASVGSFRIGPSTLLGRGVAFRVLLFSSLWRLRARAYAAISRVRSAALPVAASWLHLRNSHGVLLMAVLLALFLRKLSAARSRAALARRRRQHEKAMLHAGTYEVWARAAKVLDKMSEQVHEADFYDEELIRNRLEELRRRREDGSLRDVVFCMRGDLVRNLGNMCNPELHKGRLEVPKLIKEYIEEVSTQLRMVCESDTDELLLEEKLAFVQETRHAFGRTALLLSGGASLGSFHVGVVKTLVEHKLLPRIIAGSSVGSIICSIVATRTWPEIESFFTDSLQTLQFFDRMGGIFAVMRRVTTYGALHDISQMQRLLRDLTSNLTFQEAYDMTGRVLGITVCSPRKNEPPRCLNYLTAPHVVIWSAVTASCAFPGLFEAQELMAKDRFGNIVPFHAPFATDPEQGPGASKRRWRDGSLEMDLPMMRLKELFNVNHFIVSQTNPHISPLLRMKELVRAYGGRFAGKLARLAEMEVKYRCNQILEIGLPMGGLAKLFAQDWEGDVTMVMPATLAQYLKIIQNPTYAELQMAANQGRRCTWEKLSAIRANCAIELALDESIAVVNHKRRLKRSMERTAAASQGHSNYVRPKTPRRIPSWSRISRENSSESLAEEISAVAASSMQQGAALVVGAPPTTLSQHVRRSSHDGSESESETIDLNSWTRSGGPLMRTASADRFISFIHNIEIDTELSRPCAVEGDAAGILSESTFPNDSRPNNSSSVSTMPGRCTENSGTESCNTVNTRASTPTSMAVREGDLLPPESTTDGVLLNIVKRDALQDGVIELVESSCAEGYAANCDTVSGLDC

SEQ ID NO: 171 - DNA, 2424 bp, Zea mays
  CDS (1)..(2424)
atggacgagtccggggaagcgagcgtcggctccttcaggatcgggccgtcgacgctgctgggccgcggggtggcgttccgcgtgctcctcttcagctcgctgtggcgcctgcgggcgcgcgcgtacgcggccatctcgcgcgtgcgcagcgcggcgctgccggtggcggcgtcctggctacacctcaggaacagccacggcgtcctcctcatggccgtgctcctcgccctcttcctgaggaaactctcggccgcgcggtcgcgggcggcgctcgcgcgccggcgcaggcagcacgagaaggccatgctgcatgccgggacgtacgaggtctgggcgcgcgccgccaaggtgctcgacaagatgtctgagcaggtccacgaggcggatttctacgacgaggagctcatcaggaataggcttgaggaactccggagacggagggaggacgggtcgctccgggacgtggtgttctgtatgcgcggcgatcttgttaggaacatggggaacatgtgcaaccctgaacttcacaagggcaggctagaggttcctaagcctataaaggagtacattgaagaggtttctactcaactaagaatggtgtgcgaatctgacactgacgagttgctgttggaagagaaacttgcctttgttcaggagaccaggcatgcctttgggaggacagcgctactcctaagtgggggtgcttcactcgggtctttccatgtaggtgtagtgaaaacattggttgagcataaggttctgcctcggattatagcaggatcaagcgttggttccatcatatgttcgatcgttgctacccgtacatggcctgagattgagagcttcttcacagactcattacagaccttgcagtttttcgacaggatgggcggaatttttgcagtgatgaggcgtgtcaccacttatggtgcactgcatgacattagccagatgcaaaggcttttgagggatctcacaagtaacttaacatttcaagaggcttatgacatgaccggccgtgttcttgggatcaccgtttgctctcctagaaaaaatgagccaccccgctgcctcaactacctgacggcaccacatgttgttatttggagtgcagtaaccgcctcttgtgcatttcctgggctctttgaagctcaggaactgatggcaaaggataggttcggcaacatcgttcccttccatgcaccctttgccacagatcctgaacaaggtcctggagcatcgaagcgcaggtggagagacgggagcttggagatggatttacccatgatgagacttaaggagttgtttaatgtaaaccatttcattgtgagccaaactaaccctcacatttctccactcctccggatgaaagagcttgttagagcctatggagggcgctttgctggaaagcttgctcgtcttgctgaaatggaggttaagtatcgatgcaaccaaatcctagagatcggtcttccaatgggaggacttgcaaaattgtttgcccaggattgggagggtgatgtgaccatggttatgccagcaacacttgctcagtacttgaagatcattcagaatccaacatacgcggagctccaaatggctgccaaccaaggccgcaggtgcacatgggagaagctctccgcaatcagagcgaactgcgccattgaacttgcactggacgaatccatagcggttctaaaccacaaacggaggctaaaacgaagcatggagaggacggcggcggcttcacagggtcactctaactatgtccgacccaagactccgaggaggataccgtcatggagccgcatcagtcgagagaactcttcggagtctctcgcggaagagatctctgcggttgctgcttcgtccatgcaacaaggcgctgctcttgttgtcggcgcaccaccaacgactctttctcagcatgttcggcgcagttctcacgacggaagtgagagtgagtcagaaaccattgaccttaattcctggaccaggagtggagggcctctaatgaggacagcgtccgccgacaggttcatcagtttcatccataacattgagattgacacagaattaagtaggccctgtgctgtggaaggtgatgctgcaggtattttgtcagaatctaccttcccaaacggttcacgaccgaacaatagctcaagtgttagtatgccaggtagatgcacagaaaattctgggaccgagtcgtgcaacactgtcaacaccagagcttctactcccacaagcatggctgttcgtgaaggagatttgctgccgcctgaaagcactactgatggtgtcctacttaacattgtgaaaagagacgccctgcaggatggtgtaattgaattggtggaaagctcctgcgctgaaggatatgcggcaaactgtgacaccgtctcagggctagactgctga

SEQ ID NO: 172 - protein, 807 aa, Zea mays
MDESGEASVGSFRIGPSTLLGRGVAFRVLLFSSLWRLRARAYAAISRVRSAALPVAASWLHLRNSHGVLLMAVLLALFLRKLSAARSRAALARRRRQHEKAMLHAGTYEVWARAAKVLDKMSEQVHEADFYDEELIRNRLEELRRRREDGSLRDVVFCMRGDLVRNMGNMCNPELHKGRLEVPKPIKEYIEEVSTQLRMVCESDTDELLLEEKLAFVQETRHAFGRTALLLSGGASLGSFHVGVVKTLVEHKVLPRIIAGSSVGSIICSIVATRTWPEIESFFTDSLQTLQFFDRMGGIFAVMRRVTTYGALHDISQMQRLLRDLTSNLTFQEAYDMTGRVLGITVCSPRKNEPPRCLNYLTAPHVVIWSAVTASCAFPGLFEAQELMAKDRFGNIVPFHAPFATDPEQGPGASKRRWRDGSLEMDLPMMRLKELFNVNHFIVSQTNPHISPLLRMKELVRAYGGRFAGKLARLAEMEVKYRCNQILEIGLPMGGLAKLFAQDWEGDVTMVMPATLAQYLKIIQNPTYAELQMAANQGRRCTWEKLSAIRANCAIELALDESIAVLNHKRRLKRSMERTAAASQGHSNYVRPKTPRRIPSWSRISRENSSESLAEEISAVAASSMQQGAALVVGAPPTTLSQHVRRSSHDGSESESETIDLNSWTRSGGPLMRTASADRFISFIHNIEIDTELSRPCAVEGDAAGILSESTFPNGSRPNNSSSVSMPGRCTENSGTESCNTVNTRASTPTSMAVREGDLLPPESTTDGVLLNIVKRDALQDGVIELVESSCAEGYAANCDTVSGLDC
